(19) United States
(12) Patent Application Publication
(10) Pub. No.: US 2009/0170197 A1
(43) Pub. Date: Jul. 2, 2009

(54) Nucleic Acid-Mediated Treatment of Diseases or Conditions Related to Levels of Vascular Endothelial Growth Factor Receptor (VEGF-R)

(75) Inventors: Pamela Pavco, Lafayette, CO (US); James McSwiggen, Boulder, CO (US); Dan Stinchcomb, Ft. Collins, CO (US); Jaime Escobedo, Alamo, CA (US); Julian Kim, Shaker Heights, OH (US); Daniel Lindner, Shaker Heights, OH (US)

Correspondence Address: MCDONNELL, BOEHNEN, HULBERT AND BERGHOFF, LLP, 300 SOUTH WACKER DRIVE, SUITE 3100, CHICAGO, IL, 60606, US

(73) Assignee: SIRNA THERAPEUTICS INC., San Francisco, CA (US)

(21) Appl. No.: 12/170,393

(22) Filed: Jul. 9, 2008

Related U.S. Application Data
(63) Continuation of application No. 10/287,949, filed on Nov. 4, 2002, now abandoned.
Application No. 10/287,949 is a continuation-in-part of application No. 10/138,674, filed on May 3, 2002, now Pat. No. 7,034,009.
Application No. 10/138,674 is a continuation-in-part of application No. 09/870,161, filed on May 29, 2001, now abandoned.
Application No. 09/870,161 is a continuation-in-part of application No. 09/708,690, filed on Nov. 7, 2000, now abandoned.
Application No. 09/708,690 is a continuation-in-part of application No. 09/371,722, filed on Aug. 10, 1999, now Pat. No. 6,534,872.
Application No. 09/371,722 is a continuation-in-part of application No. 08/584,040, filed on Jan. 11, 1996, now Pat. No. 6,346,398.
(60) Provisional application No. 60/005,974, filed on Oct. 26, 1995.

(51) Int. Cl. C12N 5/08; C12N 5/06

(52) U.S. Cl. 435/377

(57) ABSTRACT

The present invention relates to nucleic acid molecules such as ribozymes, DNAzymes, short interfering RNA (siRNA), short interfering nucleic acid (siNA), and antisense which modulate the synthesis, expression and/or stability of an mRNA encoding one or more receptors of vascular endothelial growth factor, such as flt-1 (VEGFR1) and/or KDR (VEGFR2). Nucleic acid molecules and methods for the inhibition of angiogenesis and treatment of cancer and other conditions associated with VEGF-R are provided, optionally in conjunction with other therapeutic agents such as interferons.

[0001] This application is a continuation of U.S. Ser. No. 10/287,949, filed Nov. 4, 2002, which is a continuation-in-part of Pavco et al., U.S. Ser. No. 10/138,674, filed May 3, 2002, entitled “Enzymatic Nucleic Acid-Mediated Treatment of Ocular Diseases or Conditions Related to Levels of Vascular Endothelial Growth Factor Receptor (VEGF-R)” which is a continuation-in-part of Pavco et al., U.S. Ser. No. 09/870,161, filed May 29, 2001, which is a continuation-in-part of Pavco et al., U.S. Ser. No. 09/708,690, filed Nov. 7, 2000, which is a continuation-in-part of Pavco et al., U.S. Ser. No. 09/371,722, filed Aug. 10, 1999, which is a continuation-in-part of Pavco et al.; U.S. Ser. No. 08/584,040, filed Jan. 11, 1996, which claims the benefit of Pavco et al., U.S. Ser. No. 60/005,974, filed on Oct. 26, 1995, all which are entitled “Method and Reagent for Treatment of Diseases or Conditions Related To Levels of Vascular Endothelial Growth Factor Receptor”. Each of these applications is hereby incorporated by reference herein in its entirety including the drawings and tables.

### BACKGROUND OF THE INVENTION

[0002] This invention relates to methods and reagents for the treatment of diseases or conditions relating to the levels of expression of vascular endothelial growth factor (VEGF) receptor(s).

[0003] The following is a discussion of relevant art, none of which is admitted to be prior art to the present invention.

[0004] VEGF, also referred to as vascular permeability factor (VPF) and vasculotropin, is a potent and highly specific mitogen of vascular endothelial cells (for a review see Ferrara, 1993 Trends Cardiovas. Med. 3, 244; Neufeld et al., 1994 Prog. Growth Factor Res. 5, 89). VEGF induced neovascularization is implicated in various pathological conditions such as tumor angiogenesis, proliferative diabetic retinopathy, hypoxia-induced angiogenesis, rheumatoid arthritis, psoriasis, wound healing and others.

[0005] VEGF, an endothelial cell-specific mitogen, is a 34-45 kDa glycoprotein with a wide range of activities that include promotion of angiogenesis, enhancement of vascular-permeability and others. VEGF belongs to the platelet-derived growth factor (PDGF) family of growth factors with approximately 18% homology with the A and B chain of PDGF at the amino acid level. Additionally, VEGF contains the eight conserved cysteine residues common to all growth factors belonging to the PDGF family (Neufeld et al., supra). VEGF protein is believed to exist predominantly as disulfide-linked homodimers; monomers of VEGF have been shown to be inactive (Plouet et al., 1989 EMBO J. 8, 3801).

[0006] VEGF exerts its influence on vascular endothelial cells by binding to specific high-affinity cell surface receptors. Covalent cross-linking experiments with ¹²⁵I-labeled VEGF protein have led to the identification of three high molecular weight complexes of 225, 195 and 175 kDa presumed to be VEGF and VEGF receptor complexes (Vaisman et al., 1990 J. Biol. Chem. 265, 19461). Based on these studies VEGF-specific receptors of 180, 150 and 130 kDa molecular mass were predicted. In endothelial cells, receptors of 150 and the 130 kDa have been identified. The VEGF receptors belong to the superfamily of receptor tyrosine kinases (RTKs) characterized by a conserved cytoplasmic catalytic kinase domain and a hydrophylic kinase sequence. The extracellular domains of the VEGF receptors consist of seven immunoglobulin-like domains that are thought to be involved in VEGF binding functions.

[0007] The two most abundant and high-affinity receptors of VEGF are flt-1 (fms-like tyrosine kinase) cloned by Shibuya et al., 1990 Oncogene 5, 519 and KDR (kinase-insert-domain-containing receptor) cloned by Terman et al., 1991 Oncogene 6, 1677. The murine homolog of KDR, cloned by Mathews et al., 1991, Proc. Natl. Acad. Sci., USA, 88, 9026, shares 85% amino acid homology with KDR and is termed as flk-1 (fetal liver kinase-1). Recently it has been shown that the high-affinity binding of VEGF to its receptors is modulated by cell surface-associated heparin and heparin-like molecules (Gitay-Goren et al., 1992 J. Biol. Chem. 267, 6093).

[0008] VEGF expression has been associated with several pathological states such as tumor angiogenesis, several forms of blindness, rheumatoid arthritis, psoriasis and others. Following is a brief summary of evidence supporting the involvement of VEGF in various diseases:

[0009] 1) Tumor angiogenesis: Increased levels of VEGF gene expression have been reported in vascularized and edema-associated brain tumors (Berkman et al., 1993 J. Clini. Invest. 91, 153). A more direct demonstration of the role of VEGF in tumor angiogenesis was demonstrated by Jim Kim et al., 1993 Nature 362,841 wherein, monoclonal antibodies against VEGF were successfully used to inhibit the growth of rhabdomyosarcoma, glioblastoma multiforme cells in nude mice. Similarly, expression of a dominant negative mutated form of the flt-1 VEGF receptor inhibits vascularization induced by human glioblastoma cells in nude mice (Millauer et al., 1994, Nature 367, 576).

[0010] 2) Ocular diseases: Aiello et al., 1994 New Engl. J. Med. 331, 1480, showed that the ocular fluid of a majority of subjects suffering from diabetic retinopathy and other retinal disorders, contains a high concentration of VEGF. Miller et al., 1994 Am. J. Pathol. 145, 574, reported elevated levels of VEGF mRNA in subjects suffering from retinal ischemia. These observations support a direct role for VEGF in ocular diseases.

[0011] 3) Psoriasis: Detmar et al., 1994 J. Exp. Med. 180, 1141 reported that VEGF and its receptors were over-expressed in psoriatic skin and psoriatic dermal microvessels, suggesting that VEGF plays a significant role in psoriasis.

[0012] 4) Rheumatoid arthritis: Immunohistochemistry and in situ hybridization studies on tissues from the joints of subjects suffering from rheumatoid arthritis show an increased level of VEGF and its receptors (Fava et al., 1994 J. Exp. Med. 180, 341). Additionally, Koch et al., 1994 J. Immunol. 152, 4149, found that VEGF-specific antibodies were able to significantly reduce the mitogenic activity of synovial tissues from subjects suffering from rheumatoid arthritis. These observations support a direct role for VEGF in rheumatoid arthritis.

[0013] 5) Autosomal dominant polycystic kidney disease (ADPKD): ADPKD is the most common life threatening hereditary disease in the USA. It affects about 1:400 to 1:1000 people. Approximately 50% of people with ADPKD develop renal failure. ADPKD accounts for about 5-10% of end-stage renal failure in the United States requiring dialysis and renal transplantation. Several animal models, including the Han:SPRD rat model, mice with a targeted mutation in the Pkd2 gene, and congenital polycystic kidney (cpk) mice, closely resemble human ADPKD and present an opportunity to evaluate the therapeutic effect of agents that have the potential to interfere with one or more of the pathogenic elements of ADPKD. One of the features of ADPKD is angiogenesis. Angiogenesis may be necessary for growth of cyst cells as well as increased vascular permeability promoting fluid secretion into cysts. Proliferation of cystic epithelium is also a feature of ADPKD. Cyst cells in culture produce soluble vascular endothelial growth factor (VEGF), which is proven to be specific and critical for blood vessel formation. VEGF is also the best validated target for anti-angiogenesis therapies based on overwhelming genetic, mechanistic and animal efficacy data. However, VEGF can also directly stimulate proliferation of epithelial cells. VEGF triggers a response by interacting with cell-surface receptors. VEGFR1 has been detected in epithelial cells of cystic tubules but not in endothelial cells in the vasculature of cystic kidneys or normal kidneys. VEGFR2 expression is increased in endothelial cells of cyst vessels and in endothelial cells during renal ischemia-reperfusion. It is proposed that inhibition of VEGF receptors with anti-VEGFR1 and anti-VEGFR2 (KDR) agents (eg. nucleic acid molecules of the invention) would attenuate cyst formation, renal failure and mortality in ADPKD. Anti-VEGFR2 agents (eg. nucleic acid molecules of the invention) would inhibit angiogenesis involved in cyst formation. As VEGFR1 is present in cystic epithelium and not in vascular endothelium of cysts, it is proposed that anti-VEGFR1 agents would attenuate cystic epithelial cell proliferation and apoptosis which would in turn lead to less cyst formation. Further, it is proposed that VEGF produced by cystic epithelial cells is one of the stimuli for angiogenesis as well as epithelial cell proliferation and apoptosis. Validation assays for nucleic acid molecules of the invention can be performed in Han:SPRD rats, mice with a targeted mutation in the Pkd2 gene, and cpk mice. The effect of anti-VEGF nucleic acids on cyst formation and renal failure can determine the potential harmful role of angiogenesis in ADPKD.

[0014] In addition to the above data on pathological conditions involving excessive angiogenesis, a number of studies have demonstrated that VEGF is both necessary and sufficient for neovascularization. Takashita et al., 1995 J. Clin. Invest. 93, 662, demonstrated that a single injection of VEGF augmented collateral vessel development in a rabbit model of ischemia. VEGF also can induce neovascularization when injected into the cornea. Expression of the VEGF gene in CHO cells is sufficient to confer tumorigenic potential to the cells. Kim et al., supra and Millauer et al., supra used monoclonal antibodies against VEGF or a dominant negative form of flk-1 receptor to inhibit tumor-induced neovascularization.

[0015] During development, VEGF and its receptors are associated with regions of new vascular growth (Millauer et al., 1993 Cell 72, 835; Shalaby et al., 1993 J. Clin. Invest. 91, 2235). Furthermore, transgenic mice lacking either of the VEGF receptors are defective in blood vessel formation, in fact these mice do not survive; flk-1 appears to be required for differentiation of endothelial cells, while flt-1 appears to be required at later stages of vessel formation (Shalaby et al., 1995 Nature 376, 62; Fung et al., 1995 Nature 376, 66). Thus, these receptors must be present to properly signal endothelial cells or their precursors to respond to vascularization-promoting stimuli.

[0016] All of the conditions listed above, involve extensive vascularization. This hyper-stimulation of endothelial cells may be alleviated by VEGF antagonists. Thus most of the therapeutic efforts for the above conditions have concentrated on finding inhibitors of the VEGF protein.

[0017] Kim et al., 1993 Nature 362, 841 have been successful in inhibiting VEGF-induced tumor growth and angiogenesis in nude mice by treating the mice with VEGF-specific monoclonal antibody.

[0018] Koch et al., 1994 J. Immunol. 152, 4149 showed that the mitogenic activity of microvascular endothelial cells found in rheumatoid arthritis (RA) synovial tissue explants and the chemotactic property of endothelial cells from RA synovial fluid can be neutralized significantly by treatment with VEGF-specific antibodies.

[0019] Ullrich et al., International PCT Publication No. WO 94/11499 and Millauer et al., 1994 Nature 367, 576 used a soluble form of flk-1 receptor (dominant-negative mutant) to prevent VEGF-mediated tumor angiogenesis in immunodeficient mice.

[0020] Kendall and Thomas, International PCT Publication No. WO 94/21679 describe the use of naturally occurring or recombinantly-engineered soluble forms of VEGF receptors to inhibit VEGF activity.

[0021] Robinson, International PCT Publication No. WO 95/04142 describes the use of antisense oligonucleotides targeted against VEGF RNA to inhibit VEGF expression.

[0022] Jellinek et al., 1994 Biochemistry 33, 10450 describe the use of VEGF-specific high-affinity RNA aptamers to inhibit the binding of VEGF to its receptors.

[0023] Rockwell and Goldstein, International PCT Publication No. WO 95/21868, describe the use of anti-VEGF receptor monoclonal antibodies to neutralize the effect of VEGF on endothelial cells.

### SUMMARY OF THE INVENTION

[0024] The invention features novel nucleic acid-based compounds [e.g., enzymatic nucleic acid molecules (ribozymes such as Inozyme, G-cleaver, amberzyme, zinzyme), DNAzymes, antisense nucleic acids, 2-5A antisense chimeras, triplex forming nucleic acid, decoy nucleic acids, aptamers, allozymes, antisense nucleic acids containing RNA cleaving chemical groups (Cook et al., U.S. Pat. No. 5,359,051), small interfering RNA (siRNA), small interfering nucleic acid (siNA, Beigelman et al., U.S. Ser. No. 60/409,293)] and methods for their use to down regulate or inhibit the expression of receptors of VEGF (VEGF-R such as VEGFR1 and/or VEGFR2).

[0025] In one embodiment, the invention features the use of one or more of the nucleic acid-based compounds to inhibit the expression of VEGFR1 (flt-1) and/or VEGFR2 (flk-1/KDR) receptors.

[0026] In another embodiment, the present invention features a compound having Formula I: (SEQ ID NO: 20818).

5′ gₛaₛgₛuₛugcUGAuGagg ccgaaa ggccGaaAgucugB 3′

[0027] wherein each a is 2′-O-methyl adenosine nucleotide, each g is a 2′-O-methyl guanosine nucleotide, each c is a 2′-O-methyl cytidine nucleotide, each u is a 2′-O-methyl uridine nucleotide, each A is adenosine, each G is guanosine, each s individually represents a phosphorothioate internucleotide linkage, U is 2′-deoxy-2′-C-allyl uridine, and B is an inverted deoxyabasic moiety.

[0028] In another embodiment, the present invention features a compound having Formula II: (SEQ ID NO: 13488).

5′-uₛaₛcₛ aₛau ucU GAu Gag gcg aaa gcc Gaa Aag aca aB-3′

[0029] wherein each a is 2′-O-methyl adenosine nucleotide, each g is a 2′-O-methyl guanosine nucleotide, each c is a 2′-O-methyl cytidine nucleotide, each u is a 2′-O-methyl uridine nucleotide, each A is adenosine, each G is guanosine, each s individually represents a phosphorothioate internucleotide linkage, U is 2′-deoxy-2′-C-allyl uridine, and B is an inverted deoxyabasic moiety.

[0030] In one embodiment, the invention features a composition comprising a compound of Formula I and/or II in a pharmaceutically acceptable carrier or diluent.

[0031] In another embodiment, the invention features a method of administering to a cell, for example a mammalian cell or human cell, the compound of Formula I and/or II, comprising contacting the cell with the compound under conditions suitable for administration, for example in the presence of a delivery reagent. Examples of suitable delivery reagents include a lipid, cationic lipid, phospholipid, or liposome as described herein and known in the art.

[0032] In one embodiment, the invention features a method of administering to a cell the compound of Formula I or II in conjunction with a chemotherapeutic agent comprising contacting the cell with the compound and the chemotherapeutic agent under conditions suitable for administration.

[0033] Examples of chemotherapeutic agents that can be combined with the compound of Formula I and/or II include but are not limited to 5-fluoro uridine, Leucovorin, Irinotecan (CAMPTOSAR® or CPT-11 or Camptothecin-11 or Campto), Paclitaxel, or Carboplatin or a combination thereof.

[0034] In another embodiment, the present invention also features a cell comprising the compound of Formula I and/or II, wherein the cell is a mammalian cell. For example, in one embodiment the mammalian cell is a human cell.

[0035] In one embodiment, the invention features a method of inhibiting angiogenesis, for example tumor angiogenesis, in a subject comprising the step of contacting the subject with the compound of Formula I and/or II under conditions suitable for said inhibition. In one embodiment, the subject is a mammal, for example, a human.

[0036] In another embodiment, the invention features a method of treatment of a subject having a condition associated with an increased level of VEGF receptor, for example, cancers such as breast cancer, lung cancer, colorectal cancer, renal cancer, pancreatic cancer, or melanoma; Autosomal dominant polycystic kidney disease (ADPKD); or ocular indications such as diabetic retinopathy, or age related macular degeneration, comprising contacting one or more cells of the subject with the compound of Formula I and/or II, under conditions suitable for the treatment. In one embodiment, the subject is a human.

[0037] In another embodiment, the invention features a method of treatment of a subject having an ocular condition associated with an increased level of a VEGF receptor, for example, diabetic retinopathy, or age related macular degeneration, comprising contacting one or more cells of the subject with a nucleic acid molecule, such as an enzymatic nucleic acid molecule, targeted against a VEGF receptor RNA, e.g., a molecule according to Formula I and/or II, under conditions suitable for the treatment. In one embodiment, the subject is a human.

[0038] In yet another embodiment, a method of treatment of the invention further comprises the use of one or more drug therapies under conditions suitable for the treatment.

[0039] In one embodiment, the present invention also features a method of cleaving RNA comprising a sequence of VEGFR1 (flt-1) comprising contacting the compound of Formula I with the RNA under conditions suitable for the cleavage of the RNA, for example, where the cleavage is carried out in the presence of a divalent cation such as Mg2+.

[0040] In another embodiment, the invention features a method of administering to a mammal, for example a human, the compound of Formula I and/or II comprising contacting the mammal with the compound under conditions suitable for the administration, for example, in the presence of a delivery reagent such as a lipid, cationic lipid, phospholipid, or liposome.

[0041] In yet another embodiment, the invention features a method of administering to a mammal the compound of Formula I and/or II in conjunction with a chemotherapeutic agent comprising contacting the mammal, for example a human, with the compound and the chemotherapeutic agent under conditions suitable for the administration.

[0042] In another embodiment, the invention features a composition comprising the nucleic acid molecule of the instant invention and a pharmaceutically acceptable carrier or diluent.

[0043] In one embodiment, the invention features one or more nucleic acid-based molecules and methods that independently or in combination modulate the expression of gene(s) encoding vascular endothelial growth factor receptors. Specifically, the present invention features nucleic acid molecules that modulate the expression of VEGF (for example Genbank Accession No. NM_{—}003376), VEGFR1 receptor (for example Genbank Accession No. NM_{—}002019), and VEGFR2 receptor (for example Genbank Accession No. NM_{—}002253) that are useful in preventing, treating, controlling, and/or diagnosing diseases and conditions described herein.

[0044] By “inhibit” it is meant that the activity of VEGF-R or level of VEGF-R mRNAs or equivalent RNAs encoding VEGF-R is reduced below that observed in the absence of a nucleic acid molecule of the instant invention. In one embodiment, inhibition with enzymatic nucleic acid preferably is below that level observed in the presence of an enzymatically inactive or attenuated molecule that is able to bind to the same site on the mRNA, but is unable to cleave that RNA. In another embodiment, inhibition with antisense oligonucleotides is preferably below that level observed in the presence of, for example, an oligonucleotide with scrambled sequence or with mismatches. In another embodiment, inhibition with siRNA or siNA nucleic acid molecules is preferably below that level observed in the presence of, for example, an oligonucleotide with scrambled sequence or with mismatches. In another embodiment, inhibition of a VEGF-R gene with the nucleic acid molecule of the instant invention is greater in the presence of the nucleic acid molecule than in its absence.

[0045] By “VEGF-R” as used herein in meant a vascular endothelial growth factor receptor, for example VEGFR1 (also referred to as flt-1) and/or VEGFR2 (also referred to as flk-1 or kdr).

[0046] By “enzymatic nucleic acid molecule” it is meant an RNA molecule which has complementarity in a substrate binding region to a specified gene target, and also has an enzymatic activity which is active to specifically cleave target RNA. That is, the enzymatic RNA molecule is able to intermolecularly cleave RNA and thereby inactivate a target RNA molecule. The complementary region(s) allows sufficient hybridization of the enzymatic RNA molecule to the target RNA and thus permit cleavage. One hundred percent complementarity is preferred, but complementarity as low as 50-75% can also be useful in this invention. The nucleic acids can be modified at the base, sugar, and/or phosphate groups. The term enzymatic nucleic acid is used interchangeably with phrases such as ribozymes, catalytic RNA, enzymatic RNA, enzymatic DNA, catalytic DNA, catalytic oligonucleotides, nucleozyme, DNAzyme, Zinzyme, RNA enzyme, endoribonuclease, endonuclease, minizyme, leadzyme, oligozyme or DNA enzyme. All of these terminologies describe nucleic acid molecules with enzymatic activity. The specific enzymatic nucleic acid molecules described in the instant application are not meant to be limiting and those skilled in the art will recognize that all that is important in an enzymatic nucleic acid molecule of this invention is that it have a specific substrate binding site which is complementary to one or more of the target nucleic acid regions, and that it have nucleotide sequences within or surrounding that substrate binding site which impart a nucleic acid cleaving activity to the molecule (Cech et al., U.S. Pat. No. 4,987,071; Cech et al., 1988, JAMA).

[0047] By “enzymatic portion” or “catalytic domain” is meant that portion/region of the enzymatic nucleic acid essential for cleavage of a nucleic acid substrate (for example see FIG. 1).

[0048] By “substrate binding arm” or “substrate binding domain” is meant that portion/region of a enzymatic nucleic acid which is complementary to (i.e., able to base-pair with) a portion of its substrate. Generally, such complementarity is 100%, but can be less if desired. For example, as few as 10 bases out of 14 can be base-paired. Such arms are shown generally in FIG. 1. That is, these arms contain sequences within an enzymatic nucleic acid are intended to bring enzymatic nucleic acid and target RNA together through complementary base-pairing interactions. The enzymatic nucleic acid of the invention can have binding arms that are contiguous or non-contiguous and can be of varying lengths. The length of the binding arm(s) are preferably greater than or equal to four nucleotides, and are of sufficient length to stably interact with the target RNA; specifically 12-100 nucleotides; more specifically 14-24 nucleotides long. If two binding arms are chosen, the design is such that the length of the binding arms are symmetrical (i.e., each of the binding arms is of the same length; e.g., five and five nucleotides, six and six nucleotides or seven and seven nucleotides long) or asymmetrical (i.e., the binding arms are of different length; e.g., six and three nucleotides; three and six nucleotides long; four and five nucleotides long; four and six nucleotides long; four and seven nucleotides long; and the like).

[0049] By “Inozyme” or “NCH” motif or configuration is meant, an enzymatic nucleic acid molecule comprising a motif as is generally described as NCH Rz in Ludwig et al., International PCT Publication No. WO 98/58058 and U.S. patent application Ser. No. 08/878,640. Inozymes possess endonuclease activity to cleave nucleic acid substrates having a cleavage triplet NCH/, where N is a nucleotide, C is cytidine and H is adenosine, uridine or cytidine, and “/” represents the cleavage site. H is used interchangeably with X. Inozymes can also possess endonuclease activity to cleave nucleic acid substrates having a cleavage triplet NCN/, where N is a nucleotide, C is cytidine, and “/” represents the cleavage site. “I” represents an Inosine nucleotide, preferably a ribo-Inosine or xylo-Inosine nucleoside.

[0050] By “G-cleaver” motif or configuration is meant, an enzymatic nucleic acid molecule comprising a motif as is generally described as G-cleaver Rz in Eckstein et al., U.S. Pat. No. 6,127,173. G-cleavers possess endonuclease activity to cleave nucleic acid substrates having a cleavage triplet NYN/, where N is a nucleotide, Y is uridine or cytidine and “/” represents the cleavage site. G-cleavers can be chemically modified.

[0051] By “amberzyme” motif or configuration is meant, an enzymatic nucleic acid molecule comprising a motif as is generally described in Beigelman et al., International PCT publication No. WO 99/55857 and U.S. patent application Ser. No. 09/476,387. Amberzymes possess endonuclease activity to cleave nucleic acid substrates having a cleavage triplet NG/N, where N is a nucleotide, G is guanosine, and “/” represents the cleavage site. Amberzymes can be chemically modified to increase nuclease stability through substitutions. In addition, differing nucleoside and/or non-nucleoside linkers can be used to substitute the 5′-gaaa-3′ loops shown in the figure. Amberzymes represent a non-limiting example of an enzymatic nucleic acid molecule that does not require a ribonucleotide (2′-OH) group within its own nucleic acid sequence for activity.

[0052] By “zinzyme” motif or configuration is meant, an enzymatic nucleic acid molecule comprising a motif as is generally described in Beigelman et al., International PCT publication No. WO 99/55857 and U.S. patent application Ser. No. 09/918,728. Zinzymes possess endonuclease activity to cleave nucleic acid substrates having a cleavage triplet including but not limited to YG/Y, where Y is uridine or cytidine, and G is guanosine and “/” represents the cleavage site. Zinzymes can be chemically modified to increase nuclease stability through substitutions, including substituting 2′-O-methyl guanosine nucleotides for guanosine nucleotides. In addition, differing nucleotide and/or non-nucleotide linkers can be used to substitute the 5′-gaaa-2′ loop of the motif. Zinzymes represent a non-limiting example of an enzymatic nucleic acid molecule that does not require a ribonucleotide (2′-OH) group within its own nucleic acid sequence for activity.

[0053] By ‘DNAzyme’ is meant, an enzymatic nucleic acid molecule that does not require the presence of a 2′-OH group within its own nucleic acid sequence for activity. In particular embodiments the enzymatic nucleic acid molecule can have an attached linker or linkers or other attached or associated groups, moieties, or chains containing one or more nucleotides with 2′-OH groups. DNAzymes can be synthesized chemically or expressed endogenously in vivo, by means of a single stranded DNA vector or equivalent thereof. An example of a DNAzyme is generally reviewed in Usman et al., U.S. Pat. No., 6,159,714; Chartrand et al., 1995, NAR 23, 4092; Breaker et al., 1995, Chem. Bio. 2, 655; Santoro et al., 1997, PNAS 94, 4262; Breaker, 1999, Nature Biotechnology, 17, 422-423; and Santoro et. al., 2000, J. Am. Chem. Soc., 122, 2433-39. The “10-23” DNAzyme motif is one particular type of DNAzyme that was evolved using in vitro selection, see Santoro et al., supra and as generally described in Joyce et al., U.S. Pat. No. 5,807,718. Additional DNAzyme motifs can be selected for using techniques similar to those described in these references, and hence, are within the scope of the present invention.

[0054] By “sufficient length” is meant a nucleic acid molecule long enough to provide the intended function under the expected condition. For example, a nucleic acid molecule of the invention needs to be of “sufficient length” to provide stable binding to a target site under the expected binding conditions and environment. In another non-limiting example, for the binding arms of an enzymatic nucleic acid, “sufficient length” means that the binding arm sequence is long enough to provide stable binding to a target site under the expected reaction conditions and environment. The binding arms are not so long as to prevent useful turnover of the nucleic acid molecule.

[0055] By “stably interact” is meant interaction of the oligonucleotides with target, such as a target protein or target nucleic acid (e.g., by forming hydrogen bonds with complementary amino acids or nucleotides in the target under physiological conditions) that is sufficient for the intended purpose (e.g., specific binding to a protein target to disrupt the function of that protein or cleavage of target RNA/DNA by an enzyme).

[0056] By “equivalent” RNA to VEGF-R is meant to include those naturally occurring RNA molecules having homology (partial or complete) to VEGF-R, or encoding for proteins with similar function as VEGF-R in various animals, including human, rodent, primate, rabbit and pig. The equivalent RNA sequence also includes in addition to the coding region, regions such as 5′-untranslated region, 3′-untranslated region, introns, intron-exon junction and the like.

[0057] By “homology” is meant the nucleotide sequence of two or more nucleic acid molecules is partially or completely identical.

[0058] By “antisense nucleic acid”, it is meant a non-enzymatic nucleic acid molecule that binds to target nucleic acid by means of RNA-RNA or RNA-DNA or RNA-PNA (protein nucleic acid; Egholm et al., 1993 Nature 365, 566) interactions and alters the activity of the target nucleic acid (for a review, see Stein and Cheng, 1993 Science 261, 1004 and Woolf et al., U.S. Pat. No. 5,849,902). Typically, antisense molecules are complementary to a target sequence along a single contiguous sequence of the antisense molecule. However, in certain embodiments, an antisense molecule can bind to substrate such that the substrate molecule forms a loop, and/or an antisense molecule can bind such that the antisense molecule forms a loop. Thus, an antisense molecule can be complementary to two (or even more) non-contiguous substrate sequences or two (or even more) non-contiguous sequence portions of an antisense molecule can be complementary to a target sequence or both. For a review of current antisense strategies, see Schmajuk et al., 1999, J. Biol. Chem., 274, 21783-21789, Delihas et al., 1997, Nature, 15, 751-753, Stein et al., 1997, Antisense N. A. Drug Dev., 7, 151, Crooke, 2000, Methods Enzymol., 313, 3-45; Crooke, 1998, Biotech. Genet. Eng. Rev., 15, 121-157, Crooke, 1997, Ad. Pharmacol., 40, 1-49. In addition, antisense DNA can be used to target nucleic acid by means of DNA-RNA interactions, thereby activating RNase H, which digests the target nucleic acid in the duplex. The antisense oligonucleotides can comprise one or more RNAse H activating region, which is capable of activating RNAse H cleavage of a target nucleic acid. Antisense DNA can be synthesized chemically or expressed via the use of a single stranded DNA expression vector or equivalent thereof.

[0059] By “RNase H activating region” is meant a region (generally about 4-25 nucleotides in length, preferably about 5-11 nucleotides in length) of a nucleic acid molecule capable of binding to a target nucleic acid to form a non-covalent complex that is recognized by cellular RNase H enzyme (see for example Arrow et al., U.S. Pat. No. 5,849,902; Arrow et al., U.S. Pat. No. 5,989,912). The RNase H enzyme binds to a nucleic acid molecule-target nucleic acid complex and cleaves the target nucleic acid sequence. The RNase H activating region comprises, for example, phosphodiester, phosphorothioate (preferably at least four of the nucleotides are phosphorothiote substitutions; more specifically, 4-11 of the nucleotides are phosphorothiote substitutions); phosphorodithioate, 5′-thiophosphate, or methylphosphonate backbone chemistry or a combination thereof. In addition to one or more backbone chemistries described above, the RNase H activating region can also comprise a variety of sugar chemistries. For example, the RNase H activating region can comprise deoxyribose, arabino, fluoroarabino or a combination thereof, nucleotide sugar chemistry. Those skilled in the art will recognize that the foregoing are non-limiting examples and that any combination of phosphate, sugar and base chemistry of a nucleic acid that supports the activity of RNase H enzyme is within the scope of the definition of the RNase H activating region and the instant invention.

[0060] By “2-5A aritisense chimera” is meant an antisense oligonucleotide containing a 5′-phosphorylated 2′-5′-linked adenylate residue. These chimeras bind to target nucleic acid in a sequence-specific manner and activate a cellular 2-5A-dependent ribonuclease which, in turn, cleaves the target nucleic acid (Torrence et al., 1993 Proc. Natl. Acad. Sci. USA 90, 1300; Silverman et al., 2000, Methods Enzymol., 313, 522-533; Player and Torrence, 1998, Pharmacol. Ther., 78, 55-113).

[0061] By “triplex forming oligonucleotides” is meant an oligonucleotide that can bind to a double-stranded polynucleotide, such as DNA, in a sequence-specific manner to form a triple-strand helix. Formation of such triple helix structure has been shown to inhibit transcription of the targeted gene (Duval-Valentin et al., 1992 Proc. Natl. Acad. Sci. USA 89, 504; Fox, 2000, Curr. Med. Chem., 7, 17-37; Praseuth et. al., 2000, Biochim. Biophys. Acta, 1489, 181-206).

[0062] By “gene” it is meant a nucleic acid that encodes an RNA, for example, nucleic acid sequences including but not limited to structural genes encoding a polypeptide.

[0063] The term “complementarity” as used herein refers to the ability of a nucleic acid to form hydrogen bond(s) with another nucleic acid sequence by either traditional Watson-Crick or other non-traditional types. In reference to nucleic molecules of the present invention, the binding free energy for a nucleic acid molecule with its target or complementary sequence is sufficient to allow the relevant function of the nucleic acid to proceed, e.g., enzymatic nucleic acid cleavage, antisense or triple helix inhibition. Determination of binding free energies for nucleic acid molecules is well known in the art (see, e.g., Turner et al., 1987, CSH Symp. Quant. Biol. LII pp. 123-133; Frier et al., 1986, Proc. Nat. Acad. Sci. USA 83:9373-9377; Turner et al., 1987, J. Am. Chem. Soc. 109:3783-3785). A percent complementarity indicates the percentage of contiguous residues in a nucleic acid molecule which can form hydrogen bonds (e.g., Watson-Crick base pairing) with a second nucleic acid sequence (e.g., 5, 6, 7, 8, 9, 10 out of 10 being 50%, 60%, 70%, 80%, 90%, and 100% complementary). “Perfectly complementary” means that all the contiguous residues of a nucleic acid sequence will hydrogen bond with the same number of contiguous residues in a second nucleic acid sequence.

[0064] By “RNA” is meant a molecule comprising at least one ribonucleotide residue. By “ribonucleotide” or “2″-OH” is meant a nucleotide with a hydroxyl group at the 2′ position of a β-D-ribo-furanose moiety.

[0065] By “nucleic acid decoy molecule”, or “decoy” as used herein is meant a nucleic acid molecule that mimics the natural binding domain for a ligand. The decoy therefore competes with the natural binding target for the binding of a specific ligand. For example, it has been shown that over-expression of HIV trans-activation response (TAR) RNA can act as a “decoy” and efficiently binds HIV tat protein, thereby preventing it from binding to TAR sequences encoded in the HIV RNA (Sullenger et al., 1990, Cell, 63, 601-608).

[0066] By “aptamer” or “nucleic acid aptamer” as used herein is meant a nucleic acid molecule that binds specifically to a target molecule wherein the nucleic acid molecule has sequence that is distinct from sequence recognized by the target molecule in its natural setting. Alternately, an aptamer can be a nucleic acid molecule that binds to a target molecule where the target molecule does not naturally bind to a nucleic acid. The target molecule can be any molecule of interest. For example, the aptamer can be used to bind to a ligand binding domain of a protein, thereby preventing interaction of the naturally occurring ligand with the protein. Similarly, the nucleic acid molecules of the instant invention can bind to VEGFR1 or VEGFR2 receptors to block activity of the receptor. This is a non-limiting example and those in the art will recognize that other embodiments can be readily generated using techniques generally known in the art, see for example Gold et al., U.S. Pat. Nos. 5,475,096 and 5,270,163; Gold et al., 1995, Annu. Rev. Biochem., 64, 763; Brody and Gold, 2000, J. Biotechnol., 74, 5; Sun, 2000, Curr. Opin. Mol. Ther., 2, 100; Kusser, 2000, J. Biotechnol., 74, 27; Hermann and Patel, 2000, Science, 287, 820; and Jayasena, 1999, Clinical Chemistry, 45,1628.

[0067] The term “short interfering nucleic acid”, “siNA”, “short interfering RNA”, “siRNA”, “short interfering nucleic acid molecule”, “short interfering oligonucleotide molecule”, or “chemically-modified short interfering nucleic acid moleule” as used herein refers to any nucleic acid molecule capable of mediating RNA interference “RNAi” or gene silencing; see for example Beigelman et al., U.S. Ser. No. 60/409,293; Bass, 2001, Nature, 411, 428-429; Elbashir et al., 2001, Nature, 411, 494-498; and Kreutzer et al., International PCT Publication No. WO 00/44895; Zernicka-Goetz et al., International PCT Publication No. WO 01/36646; Fire, International PCT Publication No. WO 99/32619; Plaetinck et al., International PCT Publication No. WO 00/01846; Mello and Fire, International PCT Publication No. WO 01/29058; Deschamps-Depaillette, International PCT Publication No. WO 99/07409; and Li et al., International PCT Publication No. WO 00/44914. For example the siNA can be a double-stranded polynucleotide molecule comprising self-complementary sense and antisense regions, wherein the antisense region comprises complementarity to a target nucleic acid molecule. The siNA can be a single-stranded hairpin polynucleotide having self-complementary sense and antisense regions, wherein the antisense region comprises complementarity to a target nucleic acid molecule. The siNA can be a circular single-stranded polynucleotide having two or more loop structures and a stem comprising self-complementary sense and antisense regions, wherein the antisense region comprises complementarity to a target nucleic acid molecule, and wherein the circular polynucleotide can be processed either in vivo or in vitro to generate an active siNA capable of mediating RNAi. As used herein, siNA molecules need not be limited to those molecules containing only RNA, but further encompasses chemically-modified nucleotides and non-nucleotides. In certain embodiments, the short interfering nucleic acid molecules of the invention lack 2′-hydroxy (2′-OH) containing nucleotides. In certain embodiments short interfering nucleic acids that do not require the presence of nucleotides having a 2′-hydroxy group for mediating RNAi are featured by the instant invention, and as such, short interfering nucleic acid molecules of the invention optionally do not contain any ribonucleotides (e.g., nucleotides having a 2′-OH group). The modified short interfering nucleic acid molecules of the invention can also be referred to as short interfering modified oligonucleotides “siMON.” As used herein, the term siNA is meant to be equivalent to other terms used to describe nucleic acid molecules that are capable of mediating sequence specific RNAi, for example short interfering RNA (siRNA), double-stranded RNA (dsRNA), micro-RNA, short hairpin RNA (shRNA), short interfering oligonucleotide, short interfering nucleic acid, short interfering modified oligonucleotide, chemically-modified siRNA, post-transcriptional gene silencing RNA (ptgsRNA), and others. In addition, as used herein, the term RNAi is meant to be equivalent to other terms used to describe sequence specific RNA interference, such as post transciptional gene silencing.

[0068] By “nucleic acid sensor molecule” or “allozyme” as used herein is meant a nucleic acid molecule comprising an enzymatic domain and a sensor domain, where the enzymatic nucleic acid domain's ability to catalyze a chemical reaction is dependent on the interaction with a target signaling molecule, such as a nucleic acid, polynucleotide, oligonucleotide, peptide, polypeptide, or protein, for example VEGF, VEGFR1 and/or VEGFR2. The introduction of chemical modifications, additional functional groups, and/or linkers, to the nucleic acid sensor molecule can provide enhanced catalytic activity of the nucleic acid sensor molecule, increased binding affinity of the sensor domain to a target nucleic acid, and/or improved nuclease/chemical stability of the nucleic acid sensor molecule, and are hence within the scope of the present invention (see for example Usman et al., U.S. patent application Ser. No. 09/877,526, George et al., U.S. Pat. Nos. 5,834,186 and 5,741,679, Shih et al., U.S. Pat. No. 5,589,332, Nathan et al., U.S. Pat. No. 5,871,914, Nathan and Ellington, International PCT publication No. WO 00/24931, Breaker et al., International PCT Publication Nos. WO 00/26226 and 98/27104, and Sullenger et al., U.S. patent application Ser. No. 09/205,520).

[0069] By “sensor component” or “sensor domain” of the nucleic acid sensor molecule as used herein is meant, a nucleic acid sequence (e.g., RNA or DNA or analogs thereof) which interacts with a target signaling molecule, for example a nucleic acid sequence in one or more regions of a target nucleic-acid molecule or more than one target nucleic acid molecule, and which interaction causes the enzymatic nucleic acid component of the nucleic acid sensor molecule to either catalyze a reaction or stop catalyzing a reaction. In the presence of target signaling molecule of the invention, such as VEGF, VEGFR1 and/or VEGFR2, the ability of the sensor component, for example, to modulate the catalytic activity of the nucleic acid sensor molecule, is inhibited or diminished. The sensor component can comprise recognition properties relating to chemical or physical signals capable of modulating the nucleic acid sensor molecule via chemical or physical changes to the structure of the nucleic acid sensor molecule. The sensor component can be derived from a naturally occurring nucleic acid binding sequence, for example, RNAs that bind to other nucleic acid sequences in vivo. Alternately, the sensor component can be derived from a nucleic acid molecule (aptamer) which is evolved to bind to a nucleic acid sequence within a target nucleic acid molecule (see for example Gold et al., U.S. Pat. Nos. 5,475,096 and 5,270,163). The sensor component can be covalently linked to the nucleic acid sensor molecule, or can be non-covalently associated. A person skilled in the art will recognize that all that is required is that the sensor component is able to selectively inhibit the activity of the nucleic acid sensor molecule to catalyze a reaction.

[0070] By “target molecule” or “target signaling molecule” is meant a molecule capable of interacting with a nucleic acid sensor molecule, specifically a sensor domain of a nucleic acid sensor molecule, in a manner that causes the nucleic acid sensor molecule to be active or inactive. The interaction of the signaling agent with a nucleic acid sensor molecule can result in modification of the enzymatic nucleic acid component of the nucleic acid sensor molecule via chemical, physical, topological, or conformational changes to the structure of the molecule, such that the activity of the enzymatic nucleic acid component of the nucleic acid sensor molecule is modulated, for example is activated or deactivated. Signaling agents can comprise target signaling molecules such as macromolecules, ligands, small molecules, metals and ions, nucleic acid molecules including but not limited to RNA and DNA or analogs thereof, proteins, peptides, antibodies, polysaccharides, lipids, sugars, microbial or cellular metabolites, pharmaceuticals, and organic and inorganic molecules in a purified or unpurified form, for example VEGF, VEGFR1 and/or VEGFR2.

[0071] The term “triplex forming oligonucleotides” as used herein refers to an oligonucleotide that can bind to a double-stranded DNA in a sequence-specific manner to form a triple-strand helix. Formation of such a triple helix structure has been shown to inhibit transcription of a targeted gene (Duval-Valentin et al., 1992 Proc. Natl. Acad. Sci. USA 89, 504; Fox, 2000, Curr. Med. Chem., 7, 17-37; Praseuth et. al., 2000, Biochim. Biophys. Acta, 1489, 181-206).

[0072] Seven basic varieties of naturally-occurring enzymatic RNAs are known presently. Each can catalyze the hydrolysis of RNA phosphodiester bonds in trans (and thus can cleave other RNA molecules) under physiological conditions. Table I summarizes some of the characteristics of these ribozymes. In general, enzymatic nucleic acids act by first binding to a target RNA. Such binding occurs through the target binding portion of a enzymatic nucleic acid which is held in close proximity to an enzymatic portion of the molecule that acts to cleave the target RNA. Thus, the enzymatic nucleic acid first recognizes and then binds a target RNA through complementary base-pairing, and once bound to the correct site, acts enzymatically to cut the target RNA. Strategic cleavage of such a target RNA destroys its ability to direct synthesis of an encoded protein. After an enzymatic nucleic acid has bound and cleaved its RNA target, it is released from that RNA to search for another target and can repeatedly bind and cleave new targets. Thus, a single enzymatic nucleic acid molecule is able to cleave many molecules of target RNA. In addition, the enzymatic nucleic acid is a highly specific inhibitor of gene expression, with the specificity of inhibition depending not only on the base-pairing mechanism of binding to the target RNA, but also on the mechanism of target RNA cleavage. Single mismatches, or base-substitutions, near the site of cleavage can completely eliminate catalytic activity of a ribozyme.

[0073] Nucleic acid molecules that target VEGF-R mRNA or specified sites in VEGF-R mRNAs represent a novel therapeutic approach to treat tumor angiogenesis, and cancers including, but not limited to, tumor and cancer types shown under Diagnosis in Table XX, ocular diseases, autosomal dominant polycystic kidney disease (ADPKD), rhuematoid arthritis, psoriasis and others. The nucleic acid molecules of the instant invention are able to inhibit the activity of VEGF-R (specifically flt-1 and flk-1/KDR). In another embodiment, the sequence specificity of siRNA and siNA or antisense acid molecules of the invention is required for their inhibitory effect. Those of ordinary skill in the art will find it clear from the exemplary nucleic acid molecules described that other nucleic acid molecules that cleave VEGF-R mRNAs or that otherwise mediate cleavage or inhibition of VEGF-R mRNA can be readily designed and are within the scope of the invention.

[0074] In one of the embodiments of the inventions described herein, the enzymatic nucleic acid molecule is formed in a hammerhead or hairpin motif, but can also be formed in the motif of a hepatitis delta virus, group I intron, group II intron or RNase P RNA (in association with an RNA guide sequence), Neurospora VS RNA, DNAzymes, Zinzymes, NCH cleaving motifs, or G-cleavers. Examples of such hammerhead motifs are described by Dreyfus, supra, Rossi et al., 1992, AIDS Research and Human Retroviruses 8, 183; of hairpin motifs by Hampel et al., EP0360257, Hampel and Tritz, 1989 Biochemistry 28, 4929, Feldstein et al., 1989, Gene 82, 53, Haseloff and Gerlach, 1989, Gene, 82, 43, and Hampel et al., 1990 Nucleic Acids Res. 18, 299; Chowrira & McSwiggen, U.S. Pat. No. 5,631,359; of the hepatitis delta virus motif is described by Perrotta and Been, 1992 Biochemistry 31, 16; of the RNase P motif by Guerrier-Takada et al., 1983 Cell 35, 849; Forster and Altman, 1990, Science 249, 783; Li and Altman, 1996, Nucleic Acids Res. 24, 835; Neurospora VS RNA ribozyme motif is described by Collins (Saville and Collins, 1990 Cell 61, 685-696; Saville and Collins, 1991 Proc. Natl. Acad. Sci. USA 88, 8826-8830; Collins and Olive, 1993 Biochemistry 32, 2795-2799; Guo and Collins, 1995, EMBO. J. 14, 363); Group II introns are described by Griffin et al., 1995, Chem. Biol. 2, 761; Michels and Pyle, 1995, Biochemistry 34, 2965; Pyle et al., International PCT Publication No. WO 96/22689; of the Group I intron by Cech et al., U.S. Pat. No. 4,987,071; of Zinzymes as is generally described by Beigelman et al., International PCT publication No. WO 99/55857 (see for example FIG. 32); and of DNAzymes as is generally described by Usman et al., International PCT Publication No. WO 95/11304; Chartrand et al., 1995, NAR 23, 4092; Breaker et al., 1995, Chem. Bio. 2, 655; Santoro et al., 1997, PNAS 94, 4262 (see for example FIG. 33). NCH cleaving motifs are described in Ludwig & Sproat, International PCT Publication No. WO 98/58058; and G-cleavers are described in Kore et al., 1998, Nucleic Acids Research 26, 4116-4120 and Eckstein et al., International PCT Publication No. WO 99/16871. These specific motifs are not limiting in the invention and those skilled in the art will recognize that all that is important in an enzymatic nucleic acid molecule of this invention is that it has a specific substrate binding site which is complementary to one or more of the target gene RNA regions, and that it have nucleotide sequences within or surrounding that substrate binding site which impart an RNA cleaving activity to the molecule (Cech et al., U.S. Pat. No. 4,987,071).

[0075] Enzymatic nucleic acid molecules of the invention that are allosterically regulated (“allozymes”) can be used to modulate VEGR receptor expression. These allosteric enzymatic nucleic acids or allozymes (see for example George et al., U.S. Pat. Nos. 5,834,186 and 5,741,679, Shih et al., U.S. Pat. No. 5,589,332, Nathan et al., U.S. Pat. No. 5,871,914, Nathan and Ellington, International PCT publication No. WO 00/24931, Breaker et al., International PCT Publication Nos. WO 00/26226 and 98/27104, and Sullenger et al., International PCT publication No. WO 99/29842) are designed to respond to a signaling agent. For example, allozymes can be designed to respond to signaling agents, such as flt-1 or kdr protein, flt-1 or kdr RNA, other proteins and/or RNAs involved in VEGF activity, and also, for example, compounds, metals, polymers, molecules and/or drugs that are targeted to VEGF or VEGF receptor, such as flt-1 or kdr expressing cells etc., which in turn modulate the activity of the enzymatic nucleic acid molecule. In response to interaction with a predetermined signaling agent, the activity of the allosteric enzymatic nucleic acid molecule is activated or inhibited such that the expression of a particular target is selectively down-regulated. The target can comprise flt-1 or kdr and/or a predetermined cellular component or receptor that modulates VEGF activity.

[0076] In a specific example, allosteric enzymatic nucleic acid molecules that are activated by interaction with a RNA encoding a flt-1 protein are used as therapeutic agents in vivo. The presence of RNA encoding the flt-1 protein activates the allosteric enzymatic nucleic acid molecule that subsequently cleaves the RNA encoding the flt-1 protein, resulting in the inhibition of flt-1 protein expression. In this manner, cells that express the flt-1 protein are selectively targeted.

[0077] In another non-limiting example, an allozyme can be activated by an flt-1 protein or peptide that caused the allozyme to inhibit the expression of flt-1 gene by, for example, cleaving RNA encoded by flt-1 gene. In this non-limiting example, the allozyme acts as a decoy to inhibit the function of flt-1 and also inhibit the expression of flt-1 once activated by the flt-1 protein.

[0078] In one embodiment, the nucleic acid molecule of the invention, e.g., antisense molecule, triplex DNA, or ribozyme, is 13 to 100 nucleotides in length, e.g., in specific embodiments 35, 36, 37, or 38 nucleotides in length (e.g., for particular ribozymes). In particular embodiments, the nucleic acid molecule is 15-100, 17-100, 20-100, 21-100, 23-100, 25-100, 27-100, 30-100, 32-100, 35-100, 40-100, 50-100, 60-100, 70-100, or 80-100 nucleotides in length. Instead of 100 nucleotides being the upper limit on the length ranges specified above, the upper limit of the length range can be, for example, 30, 40, 50, 60, 70, or 80 nucleotides. Thus, for any of the length ranges, the length range for particular embodiments has a lower limit as specified, with an upper limit as specified which is greater than the lower limit. For example, in a particular embodiment, the length range can be 35-50 nucleotides in length. All such ranges are expressly included. Also in particular embodiments, a nucleic acid molecule can have a length which is any of the lengths specified above, for example, 21 nucleotides in length.

[0079] In another embodiment, a siRNA or siNA molecule of the invention comprises a duplex having two strands, one or both of which can be chemically modified, wherein each strand is between about 18 and about 27 (e.g., about 18, 19, 20, 21, 22, 23, 24, 25, 26, or 27) nucleotides in length, wherein the duplex has between about 18 and about 23 (e.g., about 18, 19, 20, 21, 22, or 23) base pairs. For example, an exemplary siNA or siRNA molecule of the invention comprises a duplex having two strands, one or both of which can be chemically modified (eg. sugar, base or backbone modification as described herein), wherein each strand consists of 21 nucleotides, each having 2 nucleotide 3′-overhangs, and wherein the duplex has 19 base pairs.

[0080] In another embodiment, a siNA or siRNA molecule of the invention comprises a single stranded hairpin structure, wherein the siNA is between about 36 and about 70 (e.g., about 36, 40, 45, 50, 55, 60, 65, or 70) nucleotides in length having between about 18 and about 23 (e.g., about 18, 19, 20, 21, 22, or 23) base pairs, and wherein the siNA or siRNA can include one or more chemical modifications described herein. For example, an siNA or siRNA molecule of the invention comprises a linear oligonucleotide having between about 42 and about 50 (e.g., about 42, 43, 44, 45, 46, 47, 48, 49, or 50) nucleotides that can be chemically modified, wherein the linear oligonucleotide forms a hairpin structure having 19 base pairs and a 2 nucleotide 3′-overhang.

[0081] In another embodiment, a linear hairpin siNA or siRNA molecule of the invention contains a stem loop motif, wherein the loop portion of the siNA or siRNA molecule is biodegradable. For example, a linear hairpin siNA molecule of the invention is designed such that degradation of the loop portion of the siNA or siRNA molecule in vivo can generate a double stranded siNA or siRNA molecule with 3′-overhangs, such as 3′-overhangs comprising about 2 nucleotides.

[0082] In one embodiment, the invention provides a method for producing nucleic acid molecules which exhibit a high degree of specificity for the RNA of a desired target. The nucleic acid molecule is preferably targeted to a highly conserved sequence region of target mRNAs encoding VEGF-R proteins (specifically flt-1 and/or flk-1/KDR) such that specific treatment of a disease or condition can be provided with either one or several enzymatic nucleic acids. Such enzymatic nucleic acid molecules can be delivered exogenously to specific tissue or cellular targets as required. Alternatively, the nucleic acid molecules can be expressed from DNA and/or RNA vectors that are delivered to specific cells.

[0083] By “highly conserved sequence region” is meant a nucleotide sequence of one or more regions in a nucleic acid molecule that does not vary significantly from one generation to the other or from one biological system to the other.

[0084] Synthesis of nucleic acids greater than 100 nucleotides in length is difficult using automated methods, and the therapeutic cost of such molecules is prohibitive. In this invention, small nucleic acid motifs (e.g., antisense oligonucleotides, siRNA, siNA, enzymatic nucleic acid molecules) are used for exogenous delivery. The simple structure of these molecules increases the ability of the nucleic acid to invade targeted regions of the mRNA structure. However, these nucleic acid molecules can also be expressed within cells from eukaryotic promoters (e.g., Izant and Weintraub, 1985 Science 229, 345; McGarry and Lindquist, 1986 Proc. Natl. Acad. Sci. USA 83, 399; Sullenger Scanlon et al., 1991, Proc. Natl. Acad. Sci. USA, 88, 10591-5; Kashani-Sabet et al., 1992 Antisense Res. Dev., 2, 3-15; Dropulic et al., 1992 J. Virol, 66, 1432-41; Weerasinghe et al., 1991 J. Virol, 65, 5531-4; Ojwang et al., 1992 Proc. Natl. Acad. Sci. USA 89, 10802-6; Chen et al., 1992 Nucleic Acids Res., 20, 4581-9; Sarver et al., 1990 Science 247, 1222-1225, Thompson et al., 1995 Nucleic Acids Res. 23, 2259). Those skilled in the art realize that any nucleic acid can be expressed in eukaryotic cells from the appropriate DNA/RNA vector. The activity of such nucleic acids can be augmented by their release from the primary transcript by a ribozyme (Draper et al., PCT WO93/23569, and Sullivan et al., PCT WO94/02595, both hereby incorporated in their totality by reference herein; Ohkawa et al., 1992 Nucleic Acids Symp. Ser., 27, 15-6; Taira et al., 1991, Nucleic Acids Res., 19, 5125-30; Ventura et al., 1993 Nucleic Acids Res., 21, 3249-55; Chowrira et al., 1994 J. Biol. Chem. 269, 25856).

[0085] The nucleic acid molecules of the invention are useful for the prevention of diseases and conditions related to the level of VEGF-R, including cancer (including but not limited to tumor and cancer types shown under Diagnosis in Table XX), diabetic retinopathy, macular degeneration, neovascular glaucoma, myopic degeneration, autosomal dominant polycystic kidney disease (ADPKD), arthritis, psoriasis, verruca vulgaris, angiofibroma of tuberous sclerosis, pot-wine stains, Sturge Weber syndrome, Kippel-Trenaunay-Weber syndrome, Osler-Weber-Rendu syndrome and any other diseases or conditions that are related to the levels of VEGF-R (specifically flt-1 and flk-1/KDR) in a cell or tissue.

[0086] By “diseases or conditions related to the level of VEGF-R” is meant that the reduction of VEGF-R (specifically flt-1 and flk-1/KDR) RNA levels and thus reduction in the level of the respective protein will relieve, to some extent, the symptoms of the disease or condition.

[0087] Nucleic acid molecules of the invention are added directly, or can be complexed with cationic lipids, packaged within liposomes, or otherwise delivered to target cells or tissues. The nucleic acid or nucleic acid complexes can be locally administered to relevant tissues ex vivo, or in vivo through injection, infusion pump or stent, with or without their incorporation in biopolymers.

[0088] In one embodiment, the enzymatic nucleic acid molecule of the invention has one or more binding arms which are complementary to the substrate sequences in Tables II to IX, XIV-XIX, XXII, and XXIII. Examples of such enzymatic nucleic acid molecules also are shown in Tables II to IX, XIV-XIX, XXII, and XXIII. Examples of such enzymatic nucleic acid molecules consist essentially of sequences defined in these Tables.

[0089] In yet another embodiment, the invention features antisense nucleic acid molecules, siRNA, siNA, and/or 2-5A chimeras including sequences complementary to the target sequences shown in Tables II to IX, XIV-XIX, XXII, and XXIII. Such nucleic acid molecules can include sequences as shown for the binding arms of the enzymatic nucleic acid molecules in Tables II to IX, XIV-XIX, XXII, and XXIII. Similarly, triplex molecules can be provided targeted to the corresponding DNA target regions, and containing the DNA equivalent of a target sequence or a sequence complementary to the specified target (substrate) sequence. Typically, antisense and siRNA or siNA molecules are complementary to a target sequence along a single contiguous sequence of the antisense molecule. However, in certain embodiments, an antisense molecule can bind to substrate such that the substrate molecule forms a loop, and/or an antisense molecule can bind such that the antisense molecule forms a loop. Thus, the antisense molecule can be complementary to two (or even more) non-contiguous substrate sequences or two (or even more) non-contiguous sequence portions of an antisense molecule can be complementary to a target sequence or both.

[0090] By “consists essentially of” is meant that the active nucleic acid molecule of the invention, for example, an enzymatic nucleic acid molecule, contains an enzymatic center or core equivalent to those in the examples, and binding arms able to bind RNA such that cleavage at the target site occurs. Other sequences can be present that do not interfere with such cleavage. Thus, a core region can, for example, include one or more loop, stem-loop structure, or linker that does not prevent enzymatic activity. Thus, the underlined regions in the sequences in Tables II, IV, VI, VIII, XIV and XVI can be such a loop, stem-loop, nucleotide linker, and/or non-nucleotide linker and can be represented generally as sequence “X”. For example, a core sequence for a hammerhead enzymatic nucleic acid can comprise a conserved sequence, such as 5′-CUGAUGAG-3′ and 5′-CGAA-3′ connected by “X”, where X is 5′-GCCGUUAGGC-3′ (SEQ ID NO: 20822), or any other Stem II region known in the art, or a nucleotide and/or non-nucleotide linker. Similarly, for other nucleic acid molecules of the instant invention, such as Inozyme, G-cleaver, amberzyme, zinzyme, DNAzyme, antisense, 2-5A antisense, triplex forming nucleic acid, and decoy nucleic acids, other sequences or non-nucleotide linkers can be present that do not interfere with the function of the nucleic acid molecule.

[0091] X can be a linker of ≧2 nucleotides in length, preferably 3, 4, 5, 6, 7, 8, 9, 10, 15, 20, 26, 30, where the nucleotides can preferably be internally base-paired to form a stem of preferably ≧2 base pairs. Alternatively or in addition, X may be a non-nucleotide linker. In yet another embodiment, the nucleotide linker (X) can be a nucleic acid aptamer, such as an ATP aptamer, HIV Rev aptamer (RRE), HIV Tat aptamer (TAR) and others (for a review see Gold et al., 1995, Annu. Rev. Biochem., 64, 763; and Szostak & Ellington, 1993, in The RNA World, ed. Gesteland and Atkins, pp. 511, CSH Laboratory Press).

[0092] In yet another embodiment, the non-nucleotide linker (X) is as defined herein. The term “non-nucleotide” as used herein include either abasic nucleotide, polyether, polyamine, polyamide, peptide, carbohydrate, lipid, or polyhydrocarbon compounds. Specific examples include those described by Seela and Kaiser, Nucleic Acids Res. 1990, 18:6353 and Nucleic Acids Res. 1987, 15:3113; Cload and Schepartz, J. Am. Chem. Soc. 1991, 113:6324; Richardson and Schepartz, J. Am. Chem. Soc. 1991, 113:5109; Ma et al., Nucleic Acids Res. 1993, 21:2585 and Biochemistry 1993, 32:1751; Durand et al., Nucleic Acids Res. 1990, 18:6353; McCurdy et al., Nucleosides & Nucleotides 1991, 10:287; Jschke et al., Tetrahedron Lett. 1993, 34:301; Ono et al., Biochemistry 1991, 30:9914; Arnold et al., International Publication No. WO 89/02439; Usman et al., International Publication No. WO 95/06731; Dudycz et al., International Publication No. WO 95/11910 and Ferentz and Verdine, J. Am. Chem. Soc. 1991, 113:4000, all hereby incorporated by reference herein. A “non-nucleotide” further means any group or compound which can be incorporated into a nucleic acid chain in the place of one or more nucleotide units, including either sugar and/or phosphate substitutions, and allows the remaining bases to exhibit their enzymatic activity. The group or compound can be abasic in that it does not contain a commonly recognized nucleotide base, such as adenosine, guanine, cytosine, uracil or thymine. Thus, in one embodiment, the invention features an enzymatic nucleic acid molecule having one or more non-nucleotide moieties, and having enzymatic activity to cleave an RNA or DNA molecule.

[0093] In another aspect of the invention, nucleic acid molecules that cleave or inhibit expression of target RNA molecules and inhibit VEGF-R (specifically flt-1 and flk-1/KDR) activity are expressed from transcription units inserted into DNA or RNA vectors. The recombinant vectors are preferably DNA plasmids or viral vectors. Nucleic acid expressing viral vectors can be constructed based on, but not limited to, adeno-associated virus, retrovirus, adenovirus, or alphavirus vectors. Preferably, the recombinant vectors capable of expressing the nucleic acid molecules are delivered as described above, and persist in target cells. Alternatively, viral vectors can be used that provide for transient expression of nucleic acids. Such vectors can be repeatedly administered as necessary. Once expressed, the nucleic acids cleave, bind, and/or interact with the target mRNA. Delivery of nucleic acids expressing vectors can be systemic, such as by intravenous or intramuscular administration, by administration to target cells ex-planted from the subject followed by reintroduction into the subject, or by any other means that would allow for introduction into the desired target cell.

[0094] By “vectors” is meant any nucleic acid- and/or viral-based technique used to deliver a desired nucleic acid.

[0095] By “subject” is meant an organism which is a donor or recipient of explanted cells or the cells themselves. “Subject” also refers to an organism to which the nucleic acid molecules of the invention can be administered. In one embodiment, the subject is a mammal or mammalian cells. Preferably, the subject is a human or human cells.

[0096] The nucleic acid molecules of the instant invention, individually, or in combination or in conjunction with other drugs, can be used in the treatment of a disease or condition associated with VEGF-R, as discussed above. For example, a nucleic acid molecule of the invention can be administered individually or in combination with one or more drugs to a subject or the appropriate cells under conditions suitable for the treatment.

[0097] For example, to treat a disease or condition associated with VEGF-R levels, such as cancer (e.g., colorectal cancer, breast cancer), autosomal dominant polycystic kidney disease (ADPKD), or ocular diseases (e.g., diabetic retinopathy or age related macular degeneration) a subject may be treated, or other appropriate cells may be treated, as is evident to those skilled in the art, individually or in combination with one or more drugs under conditions suitable for the treatment.

[0098] In a further embodiment, the described molecules, such as siNA, siRNA, antisense or enzymatic nucleic acid molecules can be used in combination with other known treatments to treat conditions or diseases discussed above. For example, the described molecules can be used in combination with one or more known therapeutic agents to treat cancer and other diseases described herein.

[0099] In another embodiment, the invention features nucleic acid-based molecules [e.g., enzymatic nucleic acid molecules (ribozymes such as Inozyme, G-cleaver, amberzyme, zinzyme), DNAzymes, antisense nucleic acids, 2-5A antisense chimeras, triplex forming nucleic acid, decoy nucleic acids, aptamers, allozymes, antisense nucleic acids containing RNA cleaving chemical groups (Cook et al., U.S. Pat. No. 5,359,051), small interfering RNA (siRNA), small interfering nucleic acid (siNA, Beigelman et al., U.S. Ser. No. 60/409,293)] and methods for their use to down regulate or inhibit the expression of genes capable of inducing angiogenesis (e.g., flt-1 and kdr).

[0100] In another embodiment, the invention features nucleic acid-based techniques [e.g., enzymatic nucleic acid molecules (ribozymes such as Inozyme, G-cleaver, amberzyme, zinzyme), DNAzymes, antisense nucleic acids, 2-5A antisense chimeras, triplex forming nucleic acid, decoy nucleic acids, aptamers, allozymes, antisense nucleic acids containing RNA cleaving chemical groups (Cook et al., U.S. Pat. No. 5,359,051), small interfering RNA (siRNA), small interfering nucleic acid (siNA, Beigelman et al., U.S. Ser. No. 60/409,293)] and methods for their use to down regulate or inhibit the expression of VEGF receptor.

[0101] Other features and advantages of the invention will be apparent from the following description of the preferred embodiments thereof, and from the claims.

### BRIEF DESCRIPTION OF THE DRAWINGS

[0102] FIG. 1 is a diagrammatic representation of the hammerhead ribozyme domain known in the art. Stem II can be ≧2 base-pair long.

[0103] FIGS. 2a-d show hammerhead ribozyme substrate motifs. FIG. 2a is a diagrammatic representation of the hammerhead ribozyme domain known in the art; FIG. 2b is a diagrammatic representation of the hammerhead ribozyme as divided by Uhlenbeck (1987, Nature, 327, 596-600) into a substrate and enzyme portion; FIG. 2c is a similar diagram showing the hammerhead divided by Haseloff and Gerlach (1988, Nature, 334, 585-591) into two portions; and FIG. 2d is a similar diagram showing the hammerhead divided by Jeffries and Symons (1989, Nucl. Acids. Res., 17, 1371-1371) into two portions.

[0104] FIG. 3 is a diagrammatic representation of the general structure of a hairpin ribozyme. Helix 2 (H2) is provided with at least 4 base pairs (i.e., n is 1, 2, 3 or 4) and helix 5 can be optionally provided of length 2 or more bases (preferably 3-20 bases, i.e., m is from 1-20 or more). Helix 2 and helix 5 can be covalently linked by one or more bases (i.e., r is ≧1 base). Helix 1, 4 or 5 can also be extended by 2 or more base pairs (e.g., 4-20 base pairs) to stabilize the ribozyme structure, and preferably is a protein binding site. In each instance, each N and N′ independently is any normal or modified base and each dash represents a potential base-pairing interaction. These nucleotides can be modified at the sugar, base or phosphate. Complete base-pairing is not required in the helices, but is preferred. Helix 1 and 4 can be of any size (i.e., o and p is each independently from 0 to any number, e.g., 20) as long as some base-pairing is maintained. Essential bases are shown as specific bases in the structure, but those in the art will recognize that one or more can be modified chemically (abasic, base, sugar and/or phosphate modifications) or replaced with another base without significant effect. Helix 4 can be formed from two separate molecules, i.e., without a connecting loop. The connecting loop when present can be a ribonucleotide with or without modifications to its base, sugar or phosphate. “q” is ≧2 bases. The connecting loop can also be replaced with a non-nucleotide linker molecule. H refers to bases A, U, or C. Y refers to pyrimidine bases. “______” refers to a covalent bond.

[0105] FIG. 4 is a representation of the general structure of the hepatitis delta virus ribozyme domain known in the art.

[0106] FIG. 5 is a representation of the general structure of the VS RNA ribozyme domain.

[0107] FIG. 6 is a schematic representation of an RNAseH accessibility assay. Specifically, the left side of FIG. 6 is a diagram of complementary DNA oligonucleotides bound to accessible sites on the target RNA. Complementary DNA oligonucleotides are represented by broad lines labeled A, B, and C. Target RNA is represented by the thin, twisted line. The right side of FIG. 6 is a schematic of a gel separation of uncut target RNA from a cleaved target RNA. Detection of target RNA is by autoradiography of body-labeled, T7 transcript. The bands common to each lane represent uncleaved target RNA; the bands unique to each lane represent the cleaved products.

[0108] FIG. 7 shows the effect of hammerhead ribozymes targeted against flt-1 receptor on the binding of VEGF to the surface of human microvascular endothelial cells. Sequences of the ribozymes used are shown in Table II; the length of stem II region is 3 bp. The hammerhead ribozymes were chemically modified such that the ribozyme consists of ribose residues at five positions (see FIG. 11); U4 and U7 positions contain 2′-NH₂ modifications, the remaining nucleotide positions contain 2′-O-methyl substitutions; four nucleotides at the 5′ terminus contains phosphorothioate substitutions. Additionally, the 3′ end of the ribozyme contains a 3′-3′ linked inverted abasic deoxyribose. The results of two separate experiments are shown as separate bars for each set. Each bar represents the average of triplicate samples. The standard deviation is shown with error bars. For the flt-1 data, 500 nM ribozyme (3:1 charge ratio with LipofectAMINE®) was used. Control 1-10 is the control for ribozymes 307-2797, control 11-20 is the control for ribozymes 3008-5585. The Control 1-10 and Control 11-20 represent the treatment of cells with LipofectAMINE® alone without any ribozymes.

[0109] FIG. 8 shows the effect of hammerhead ribozymes targeted against KDR receptor on the binding of VEGF to KDR on the surface of human microvascular endothelial cells. Sequences of the ribozymes used are shown in Table IV; the length of stem II region is 3 bp. The hammerhead ribozymes were chemically modified such that the ribozyme consists of ribose residues at five positions (see FIG. 11); U4 and U7 positions contain 2′-NH₂ modifications, the remaining nucleotide positions contain 2′-O-methyl substitutions; four nucleotides at the 5′ terminus contains phosphorothioate substitutions. Additionally, the 3′ end of the ribozyme contains a 3′-3′ linked inverted abasic deoxyribose. The Control 1-10 and Control 11-20 represent the treatment of cells with LipofectAMINE® alone without any ribozymes. Irrel. RZ, is a control experiment wherein the cells are treated with a non-KDR-targeted ribozyme complexed with Lipofectamine®. 200 nM ribozyme (3:1 charge ratio with LipofectAMINE®) was used. In addition to the KDR-targeted ribozymes, the effect on VEGF binding of a ribozyme targeted to an irrelevant mRNA (irrel. RZ) is also shown. Because the affinity of KDR for VEGF is about 110-fold lower than the affinity of flt-1 for VEGF, a higher concentration of VEGF was used in the binding assay.

[0110] FIG. 9 shows the specificity of hammerhead ribozymes targeted against flt-1 receptor. Inhibition of the binding of VEGF, urokinase plasminogen activator (UPA) and fibroblast growth factor (FGF) to their corresponding receptors as a function of anti-FLT ribozymes is shown. The sequence and description of the ribozymes used are as described in FIG. 7 above. The average of triplicate samples is given; percent inhibition as calculated below.

[0111] FIG. 10 shows the inhibition of the proliferation of Human aortic endothelial cells (HAEC) mediated by phosphorothioate antisense oligodeoxynucleotides targeted against human KDR receptor RNA. Cell proliferation (O.D. 490) as a function of antisense oligodeoxynucleotide concentration is shown. KDR 21 AS represents a 21 nt phosphorothioate antisense oligodeoxynucleotide targeted against KDR RNA. KDR 21 Scram represents a 21 nt phosphorothioate oligodeoxynucleotide having a scrambled sequence. LF represents the lipid carrier Lipofectin.

[0112] FIGS. 11A and B show a diagrammatic representation of hammerhead ribozymes targeted against flt-1 RNA and in vitro cleavage of flt-1 RNA by hammerhead ribozymes. The hammerhead (HH) ribozymes were chemically modified such that the ribozyme consists of ribose residues at five positions; U4 and U7 positions contain 2′-NH₂ modifications, the remaining nucleotide positions contain 2′-O-methyl substitutions; four nucleotides at the 5′ terminus contains phosphorothioate substitutions. Additionally, the 3′ end of the ribozyme contains a 3′-3′ linked inverted abasic deoxyribose (designated as 3′-iH). FIG. 11A shows hammerhead ribozymes 1358 HH-A and 4229 HH-A, which contain a 3 base-paired stem II region. FIG. 11B shows hammerhead ribozymes 1358 HH-B and 4229 HH-B, which contain a 4 base-paired stem II region. FIGS. 11C and 11D show in vitro cleavage kinetics of hammerhead ribozymes targeted against sites 1358 and 4229 within the flt-1 RNA

[0113] FIG. 12 shows a diagrammatic representation of hammerhead (HH) ribozymes targeted against sites 1358 and 4229 within the flt-1 RNA. The hammerhead (HH) ribozymes were chemically modified such that the ribozyme consists of ribose residues at five positions; U4 position contains 2′-C-allyl modification, the remaining nucleotide positions contain 2′-O-methyl substitutions; four nucleotides at the 5′ terminus contains phosphorothioate substitutions. Additionally, the 3′ end of the ribozyme contains a 3′-3′ linked inverted abasic deoxyribose (designated as 3′-iH). FIG. 12B shows a graphical representation of the inhibition of cell proliferation mediated by 1358HH and 4229HH ribozymes

[0114] FIG. 13 shows inhibition of human microvascular endothelial cell proliferation mediated by anti-KDR hammerhead ribozymes. The figure is a graphical representation of the inhibition of cell proliferation mediated by hammerhead ribozymes targeted against sites 527, 730, 3702 and 3950 within the KDR RNA. Irrelevant HH RZ is a hammerhead ribozyme targeted to an irrelevant target. All of these ribozymes, including the Irrelevant HH RZ, were chemically modified such that the ribozyme consists of ribose residues at five positions; U4 and U7 positions contain 2′-NH₂ modifications, the remaining nucleotide positions contain 2′-O-methyl substitutions; four nucleotides at the 5′ termini contain phosphorothioate substitutions. Additionally, the 3′ end of the ribozyme contains a 3′-3′ linked inverted abasic deoxyribose (3′-iH).

[0115] FIG. 14 shows in vitro cleavage of KDR RNA by hammerhead ribozymes. The hammerhead (HH) ribozymes were chemically modified such that the ribozyme consists of ribose residues at five positions; U4 and U7 positions contain 2′-NH₂ modifications, the remaining nucleotide positions contain 2′-O-methyl substitutions. Additionally, the 3′ end of the ribozyme contains a 3′-3′ linked inverted abasic deoxyribose (designated as 3′-iH). 726 HH and 527 HH contain 4 base-paired stem II region. Percent in vitro cleavage kinetics as a function of time of HH ribozymes targeted against sites 527 and 726 within the KDR RNA is shown.

[0116] FIG. 15 shows in vitro cleavage of KDR RNA by hammerhead ribozymes. The hammerhead (HH) ribozymes were chemically modified such that the ribozyme consists of ribose residues at five positions; U4 and U7 positions contain 2′-NH₂ modifications, the remaining nucleotide positions contain 2′-O-methyl substitutions. Additionally, the 3′ end of the ribozyme contains a 3′-3′ linked inverted abasic deoxyribose (designated as 3′-iH). 3702 HH and 3950 HH contain 4 base-paired stem II region. Percent in vitro cleavage kinetics as a function of time of HH ribozymes targeted against sites 3702 and 3950 within the KDR RNA is shown.

[0117] FIG. 16 shows in vitro cleavage of RNA by hammerhead ribozymes that are targeted to sites that are conserved between flt-1 and KDR RNA. The hammerhead (HH) ribozymes were chemically modified such that the ribozyme consists of ribose residues at five positions; U4 and U7 positions contain 2′-NH₂ modifications, the remaining nucleotide positions contain 2′-O-methyl substitutions. Additionally, the 3′ end of the ribozyme contains a 3′-3′ linked inverted abasic deoxyribose (designated as 3′-iH). FLT/KDR-1 HH ribozyme was synthesized with either a 4 base-paired or a 3 base-paired stem II region. FLT/KDR-1 HH can cleave site 3388 within flt-1 RNA and site 3151 within KDR RNA. Percent in vitro cleavage kinetics as a function of time of HH ribozymes targeted against sites 3702 and 3950 within the KDR RNA is shown.

[0118] FIG. 17 shows inhibition of human microvascular endothelial cell proliferation mediated by anti-KDR and anti-flt-1 hammerhead ribozymes. The figure is a graphical representation of the inhibition of cell proliferation mediated by hammerhead ribozymes targeted against sites KDR sites-527, 726 or 3950 or flt-1 site 4229. The figure also shows enhanced inhibition of cell proliferation by a combination of flt-1 and KDR hammerhead ribozymes. 4229+527, indicates the treatment of cells with both the flt 4229 and the KDR 527 ribozymes. 4229+726, indicates the treatment of cells with both the flt 4229 and the KDR 726 ribozymes. 4229+3950, indicates the treatment of cells with both the flt 4229 and the KDR 3950 ribozymes. VEGF−, indicates the basal level of cell proliferation in the absence of VEGF. A, indicates catalytically active ribozyme; I, indicates catalytically inactive ribozyme. All of these ribozymes were chemically modified such that the ribozyme consists of ribose residues at five positions; U4 and U7 positions contain 2′-NH₂ modifications, the remaining nucleotide positions contain 2′-O-methyl substitutions; four nucleotides at the 5′ termini contain phosphorothioate substitutions. Additionally, the 3′ end of the ribozyme contains a 3′-3′ linked inverted abasic deoxyribose (3′-iH).

[0119] FIG. 18 shows the inhibition of VEGF-induced angiogenesis in rat cornea mediated by anti-flt-1 hammerhead ribozyme. All of these ribozymes were chemically modified such that the ribozyme consists of ribose residues at five positions; U4 position contains 2′-C-allyl modifications, the remaining nucleotide positions contain 2′-O-methyl substitutions; four nucleotides at the 5′ termini contain phosphorothioate substitutions. Additionally, the 3′ end of the ribozyme contains a 3′-3′ linked inverted abasic deoxyribose (3′-iH). A decrease in the Surface Area corresponds to a reduction in angiogenesis. VEGF alone corresponds to treatment of the cornea with VEGF and no ribozymes. Vehicle alone corresponds to the treatment of the cornea with the carrier alone and no VEGF. This control gives a basal level of Surface Area. Active 4229 HH, corresponds to the treatment of cornea with the flt-1 4229 HH ribozyme in the absence of any VEGF. This control also gives a basal level of Surface Area. Active 4229HH+VEGF, corresponds to the co-treatment of cornea with the flt-1 4229 HH ribozyme and VEGF. Inactive 4229 HH+VEGF, corresponds to the co-treatment of cornea with a catalytically inactive version of 4229 HH ribozyme and VEGF.

[0120] FIG. 19 shows ribozyme-mediated inhibition of cell proliferation. Cultured HMVEC-d were treated with ribozyme or attenuated controls as LIPOFECTAMINE™ complexes. After treatment, cells were stimulated with VEGF₁₆₅ or bFGF and allowed to grow for 48 h prior to determining the cell number. Each ribozyme was tested in triplicate at three concentrations and data are presented as mean cell number per well +SD. The data obtained following ribozyme treatment and VEGF stimulation are presented in panels A & B for anti-Flt-1 ribozymes and panels D & E for anti-KDR ribozymes. Representative data obtained following ribozyme treatment and bFGF stimulation are shown in panel C for one anti-Flt-1 ribozyme and in panel F for one anti-KDR ribozyme. In all panels, active ribozymes are represented with filled symbols; attenuated controls with open symbols. In addition to the ribozymes and attenuated controls listed in Table XII, a second set having the same sequences but with an additional basepair in the “stem II” region of the ribozyme are also shown for VEGF-induced proliferation studies. These 4 bp stem II ribozymes and attenuated controls have one additional base pair such that the stem II/loop sequence is ggccgaaaggcc. Therefore, ribozymes and controls with 3 or 4 basepair stem IIs are denoted with circles and squares, respectively. The data for one irrelevant ribozyme (filled triangle, panel B) are also shown. This irrelevant ribozyme contains an active core sequence but has no binding site in either Flt-1 or KDR mRNA. Its sequence is 5′-gₛaₛaₛgₛgaacUGAuGaggccgaaaggccGaaAgauggcT-3′ with modifications as in Table XII except that T indicates a 3′-3′ inverted deoxythymidine. For reference, the average number of cells in control wells after 48 h in the absence of VEGF or bFGF for each of the panels are as follows: A, B, C, 12477±617; D, E, F, 17182±1053.

[0121] FIG. 20 shows target specificity of anti-Flt-1 and KDR ribozymes. Cultured HMVEC-d were treated with LIPOFECTAMINE™ complexes containing 200 nM active ribozyme (A) or attenuated control (C) and analyzed by RNAse protection following 24 h of VEGF-stimulated growth. Data obtained for ribozymes and attenuated controls that target Flt-1 site 4229 or KDR site 726 are shown. Data were normalized to the level of an internal mRNA control (cyclophilin) and are presented as percent decrease in Flt-1 (left panel) or KDR mRNA (right panel) relative to an untreated control. Error bars indicate the range of duplicate samples.

[0122] FIG. 21 shows antiangiogenic efficacy of ribozyme in the rat corneal model of VEGF-induced angiogenesis. The percent inhibition of VEGF-induced angiogenesis for locally administered anti-Flt-1 (site 4229) ribozyme (filled circles) and their attenuated controls (open circles) are plotted over the dose range tested. Pixels associated with background structures including the iris were subtracted from all treatment groups. Data are expressed as mean percent reduction in VEGF-induced angiogenesis ±SEM. *p<0.05 relative to VEGF/vehicle treated controls by Dunnett's, **p<0.05 relative to attenuated dose-matched controls by Tukey-Kramer.

[0123] FIG. 22 shows antiangiogenic efficacy of ribozyme in the rat corneal model of VEGF-induced angiogenesis. The percent inhibition of VEGF-induced angiogenesis for locally administered anti-KDR (site 726) ribozyme (filled circles) and their attenuated controls (open circles) are plotted over the dose range tested. Pixels associated with background structures including the iris were subtracted from all treatment groups. Data are expressed as mean percent reduction in VEGF-induced angiogenesis ±SEM. *p<0.05 relative to VEGF/vehicle treated controls by Dunnett's, **p<0.05 relative to attenuated dose-matched controls by Tukey-Kramer.

[0124] FIG. 23 shows the effect of subcutaneous bolus administration of ANGIOZYME™ in a mouse Lewis Lung Carcinoma (LLC) model.

[0125] FIG. 24 shows the effect of ANGIOZYME™ in combination with gemcitabine or cyclophosphamide on primary tumor growth in the mouse LLC model.

[0126] FIG. 25 shows the effect of ANGIOZYME™ in combination with gemcitabine or cyclophosphamide on tumor metastases in the mouse LLC model.

[0127] FIG. 26 shows a secondary structure model of ANGIOZYME™ ribozyme bound to its RNA target.

[0128] FIG. 27 shows a time course of inhibition of primary tumor growth following systemic administration of ANGIOZYME™ in the LLC mouse model.

[0129] FIG. 28 shows inhibition of primary tumor growth following systemic administration of ANGIOZYME™ according to a certain dosing regimen in the LLC mouse model.

[0130] FIG. 29 shows a dose-dependent inhibition of tumor metastases following systemic administration of ANGIOZYME™ in a mouse colorectal model.

[0131] FIG. 30 shows inhibition of liver metastases following systemic administration of ANGIOZYME™ in a mouse colorectal model.

[0132] FIG. 31 is a graph showing the plasma concentration profile of ANGIOZYME™ after a single subcutaneous (SC) dose of 10, 30, 100 or 300 mg/m².

[0133] FIG. 32 shows an example of the Zinzyme enzymatic nucleic acid motif that is chemically stabilized (see for example Beigelman et al., International PCT publication No. WO 99/55857, incorporated by reference herein; also referred to as Class A or Class II Motif). The Zinzyme motif is a class of enzymatic nucleic molecules that do not require the presence of a ribonucleotide (2′-OH) group for its activity.

[0134] FIG. 33 shows an example of a DNAzyme motif described generally, for example in Santoro et al., 1997, PNAS, 94, 4262.

[0135] FIGS. 34 A and B show a mouse model protocol and results of proliferative retinopathy. FIG. 34A shows an outline for the mouse model of proliferative retinopathy showing the points of ribozyme administration. FIG. 34B shows a graph demonstrating the efficacy of a VEGF-receptor-targeted enzymatic nucleic acid molecule in a mouse model of proliferative retinopathy.

[0136] FIG. 35 shows the effect of anti-VEGFR1 and VEGFR2 enzymatic nucleic acid molecules on primary subcutaneous tumor growth. Tumor size (in mm2) was measured following treatment with anti-VEGFR1, anti-VEGFR2, or both anti-VEGFR1 and anti-VEGFR2 enzymatic nucleic acid molecules compared to a control (HBSS). As shown in the Figure, significant inhibition of tumor growth results from the combination treatment with anti-VEGFR1 and anti-VEGFR2 enzymatic nucleic acid molecules.

### DETAILED DESCRIPTION OF THE INVENTION

### Mechanism of Action of Nucleic Acid Molecules of the Invention

[0137] Antisense: Antisense molecules can be modified or unmodified RNA, DNA, or mixed polymer oligonucleotides and primarily function by specifically binding to matching sequences resulting in inhibition of peptide synthesis (Wu-Pong, November 1994, BioPharm, 20-33). The antisense oligonucleotide binds to target RNA by Watson Crick base-pairing and blocks gene expression by preventing ribosomal translation of the bound sequences either by steric blocking or by activating RNase H enzyme. Antisense molecules can also alter protein synthesis by interfering with RNA processing or transport from the nucleus into the cytoplasm (Mukhopadhyay &Roth, 1996, Crit. Rev. in Oncogenesis 7, 151-190).

[0138] In addition, binding of single stranded DNA to RNA can result in nuclease degradation of the heteroduplex (Wu-Pong, supra; Crooke, supra). To date, the only backbone modified DNA chemistry which acts as substrates for RNase H are phosphorothioates and phosphorodithioates. Recently it has been reported that 2′-arabino and 2′-fluoro arabino-containing oligos can also activate RNase H activity.

[0139] A number of antisense molecules have been described that utilize novel configurations of chemically modified nucleotides, secondary structure, and/or RNase H substrate domains (Woolf et al., International PCT Publication No. WO 98/13526; Thompson et al., U.S. Ser. No. 60/082,404 which was filed on Apr. 20, 1998; Hartmann et al., U.S. Ser. No. 60/101,174 which was filed on Sep. 21, 1998) all of these are incorporated by reference herein in their entirety.

[0140] Triplex Forming Oligonucleotides (TFO): Single stranded DNA can be designed to bind to genomic DNA in a sequence specific manner. TFOs are comprised of pyrimidine-rich oligonucleotides which bind DNA helices through Hoogsteen Base-pairing (Wu-Pong, supra).

[0141] The resulting triple helix composed of the DNA sense, DNA antisense, and TFO disrupts RNA synthesis by RNA polymerase. The TFO mechanism can result in gene expression or cell death since binding may be irreversible (Mukhopadhyay & Roth, supra)

[0142] 2-5A Antisense Chimera: The 2-5A system is an interferon mediated mechanism for RNA degradation found in higher vertebrates (Mitra et al., 1996, Proc Nat Acad Sci USA 93, 6780-6785). Two types of enzymes, 2-5A synthetase and RNase L, are required for RNA cleavage. The 2-5A synthetases require double stranded RNA to form 2′-5′ oligoadenylates (2-5A). 2-5A then acts as an allosteric effector for utilizing RNase L which has the ability to cleave single stranded RNA. The ability to form 2-5A structures with double stranded RNA makes this system particularly useful for inhibition of viral replication.

[0143] (2′-5′) oligoadenylate structures can be covalently linked to antisense molecules to form chimeric oligonucleotides capable of RNA cleavage (Torrence, supra). These molecules putatively bind and activate a 2-5A dependent RNase, the oligonucleotide/enzyme complex then binds to a target RNA molecule which can then be cleaved by the RNase enzyme.

[0144] Enzymatic Nucleic Acid: Seven basic varieties of naturally-occurring enzymatic RNAs are presently known. In addition, several in vitro selection (evolution) strategies (Orgel, 1979, Proc. R. Soc. London, B 205, 435) have been used to evolve new nucleic acid catalysts capable of catalyzing cleavage and ligation of phosphodiester linkages (Joyce, 1989, Gene, 82, 83-87; Beaudry et al., 1992, Science 257, 635-641; Joyce, 1992, Scientific American 267, 90-97; Breaker et al., 1994, TIBTECH 12, 268; Bartel et al., 1993, Science 261:1411-1418; Szostak, 1993, TIBS 17, 89-93; Kumar et al., 1995, FASEB J, 9,1183; Breaker, 1996, Curr. Op. Biotech., 7, 442; Santoro et al., 1997, Proc. Natl. Acad. Sci., 94, 4262; Tang et al., 1997, RNA 3, 914; Nakamaye & Eckstein, 1994, supra; Long & Uhlenbeck, 1994, supra; Ishizaka et al., 1995, supra; Vaish et al., 1997, Biochemistry 36, 6495; all of these are incorporated by reference herein). Each can catalyze a series of reactions including the hydrolysis of phosphodiester bonds in trans (and thus can cleave other RNA molecules) under physiological conditions.

[0145] Enzymatic nucleic acid molecules of this invention block to some extent VEGF-R (specifically flt-1 and flk-1/KDR) production and can be used to treat disease or diagnose such disease. Enzymatic nucleic acid molecules are delivered to cells in culture, to cells or tissues in animal models of angiogenesis and/or RA and to human cells or tissues ex vivo or in vivo. Enzymatic nucleic acid molecule cleavage of VEGF-R RNAs (specifically RNAs that encode flt-1 and flk-1/KDR) in these systems can alleviate disease symptoms.

[0146] The enzymatic nature of enzymatic nucleic acid molecules, such as ribozymes, has significant advantages, such as the concentration of enzymatic nucleic acid necessary to affect a therapeutic treatment is lower. This advantage reflects the ability of the enucleic acid molecule to act enzymatically. Thus, a single enzymatic nucleic acid molecule is able to cleave many molecules of target RNA. In addition, the enzymatic nucleic acid molecule is a highly specific inhibitor, with the specificity of inhibition depending not only on the base-pairing mechanism of binding to the target RNA, but also on the mechanism of target RNA cleavage. Single mismatches, or base-substitutions, near the site of cleavage can be chosen to completely eliminate catalytic activity of an enzymatic nucleic acid molecule.

[0147] Nucleic acid molecules having an endonuclease enzymatic activity are able to repeatedly cleave other separate RNA molecules in a nucleotide base sequence-specific manner. Such enzymatic nucleic acid molecules can be targeted to virtually any RNA transcript, and achieved efficient cleavage in vitro (Zaug et al., 324, Nature 429 1986; Uhlenbeck, 1987 Nature 328, 596; Kim et al., 84 Proc. Natl. Acad. Sci. USA 8788, 1987; Dreyfus, 1988, Einstein Quart. J. Bio. Med., 6, 92; Haseloff and Gerlach, 334 Nature 585, 1988; Cech, 260 JAMA 3030, 1988; and Jefferies et al., 17 Nucleic Acids Research 1371, 1989; Santoro et al., 1997 supra).

[0148] Because of their sequence specificity, enzymatic nucleic acids, such as trans-cleaving ribozymes can be used as therapeutic agents for human disease (Usman & McSwiggen, 1995 Ann. Rep. Med. Chem. 30, 285-294; Christoffersen and Marr, 1995 J. Med. Chem. 38, 2023-2037). Enzymatic nucleic acid molecules can be designed to cleave specific RNA targets within the background of cellular RNA. Such a cleavage event renders the RNA non-functional and abrogates protein expression from that RNA. In this manner, synthesis of a protein associated with a disease state can be selectively inhibited.

[0149] Short Interfering Nucleic Acid (siRNA/siNA): The discussion that follows discusses the proposed mechanism of RNA interference mediated by short interfering RNA as is presently known, and is not meant to be limiting and is not an admission of prior art. Applicant has determined that chemically modified short interfering nucleic acids possess similar or improved capacity to mediate RNAi as do siRNA molecules and are expected to possess improved stability and activity in vivo; therefore, this discussion is not meant to be limiting only to siRNA and can be applied to siNA as a whole. By “improved capacity to mediate RNAi” is meant to include RNAi activity measured in vitro and/or in vivo where the RNAi activity is a reflection of both the ability of the siNA to mediate RNAi and the stability of the siRNAs of the invention. In this invention, the product of these activities can be increased in vitro and/or in vivo compared to an all RNA siRNA or an siNA containing a plurality of ribonucleotides. In some cases, the activity or stability of the siNA molecule can be decreased (i.e., less than ten-fold), but the overall activity of the siNA molecule is enhanced, in vitro and/or in vivo.

[0150] RNA interference refers to the process of sequence specific post transcriptional gene silencing in animals mediated by short interfering RNAs (siRNA) (Fire et al., 1998, Nature, 391, 806). The corresponding process in plants is commonly referred to as post transcriptional gene silencing or RNA silencing and is also referred to as quelling in fungi. The process of post transcriptional gene silencing is thought to be an evolutionarily conserved cellular defense mechanism used to prevent the expression of foreign genes which is commonly shared by diverse flora and phyla (Fire et al., 1999, Trends Genet., 15, 358). Such protection from foreign gene expression may have evolved in response to the production of double stranded RNAs (dsRNA) derived from viral infection or the random integration of transposon elements into a host genome via a cellular response that specifically destroys homologous single stranded RNA or viral genomic RNA. The presence of dsRNA in cells triggers the RNAi response though a mechanism that has yet to be fully characterized. This mechanism appears to be different from the interferon response that results from dsRNA mediated activation of protein kinase PKR and 2′,5′-oligoadenylate synthetase resulting in non-specific cleavage of mRNA by ribonuclease L.

[0151] The presence of long dsRNAs in cells stimulates the activity of a ribonuclease III enzyme referred to as Dicer. Dicer is involved in the processing of the dsRNA into short pieces of dsRNA known as short interfering RNAs (siRNA) (Berstein et al., 2001, Nature, 409, 363). Short interfering RNAs derived from Dicer activity are typically about 21-23 nucleotides in length and comprise about 19 base pair duplexes. Dicer has also been implicated in the excision of 21 and 22 nucleotide small temporal RNAs (stRNA) from precursor RNA of conserved structure that are implicated in translational control (Hutvagner et al., 2001, Science, 293, 834). The RNAi response also features an endonuclease complex containing a siRNA, commonly referred to as an RNA-induced silencing complex (RISC), which mediates cleavage of single stranded RNA having sequence homologous to the siRNA. Cleavage of the target RNA takes place in the middle of the region complementary to the guide sequence of the siRNA duplex (Elbashir et al., 2001, Genes Dev., 15,188).

[0152] RNAi has been studied in a variety of systems. Fire et al., 1998, Nature, 391, 806, were the first to observe RNAi in C. elegans. Wianny and Goetz, 1999, Nature Cell Biol., 2, 70, describes RNAi mediated by dsRNA in mouse embryos. Hammond et al., 2000, Nature, 404, 293, describe RNAi in Drosophila cells transfected with dsRNA. Elbashir et al., 2001, Nature, 411, 494, describe RNAi induced by introduction of duplexes of synthetic 21-nucleotide RNAs in cultured mammalian cells including human embryonic kidney and HeLa cells. Recent work in Drosophila embryonic lysates has revealed certain requirements for siRNA length, structure, chemical composition, and sequence that are essential to mediate efficient RNAi activity. These studies have shown that 21 nucleotide siRNA duplexes are most active when containing two nucleotide 3′-overhangs. Furthermore, substitution of one or both siRNA strands with 2′-deoxy or 2′-O-methyl nucleotides abolishes RNAi activity, whereas substitution of 3′-terminal siRNA nucleotides with deoxy nucleotides was shown to be tolerated. Mismatch sequences in the center of the siRNA duplex were also shown to abolish RNAi activity. In addition, these studies also indicate that the position of the cleavage site in the target RNA is defined by the 5′-end of the siRNA guide sequence rather than the 3′-end (Elbashir et al., 2001, EMBO J., 20, 6877). Other studies have indicated that a 5′-phosphate-on the target-complementary strand of a siRNA duplex is required for siRNA activity and that ATP is utilized to maintain the 5′-phosphate moiety on the siRNA (Nykanen et al., 2001, Cell, 107, 309), however siRNA molecules lacking a 5′-phosphate are active when introduced exogenously, suggesting that 5′-phosphorylation of siRNA constructs may occur in vivo.

### Target Sites

[0153] Targets for useful enzymatic nucleic acid molecules and antisense nucleic acids can be determined as disclosed in Draper et al., WO 93/23569; Sullivan et al., WO 93/23057; Thompson et al., WO 94/02595; Draper et al., WO 95/04818; McSwiggen et al., U.S. Pat. No. 5,525,468, and hereby incorporated by reference herein in totality. Other examples include the following PCT applications which concern inactivation of expression of disease-related genes: WO 95/23225, WO 95/13380, WO 94/02595, incorporated by reference herein. Target sites useful for siRNA/siNA molecules of the invention can be determined as disclosed in, for example, Beigelman et al., U.S. Ser. No. 60/409,293. Rather than repeat the guidance provided in those documents here, below are provided specific examples of such methods, not limiting to those with skill in the art. Nucleic acid molecules to such targets are designed as described in those applications and synthesized to be tested in vitro and in vivo, as also described.

[0154] In a non-limiting example, the sequence of human and mouse flt-1, KDR and/or flk-1 mRNAs were screened for optimal enzymatic nucleic acid target sites using a computer folding algorithm. Hammerhead, hairpin, NCH, or G-Cleaver ribozyme cleavage sites were identified. These sites are shown in Tables II to IX, XIV-XIX, XXII, and XXIII (all sequences are 5′ to 3′ in the tables; X can be any base-paired sequence, the actual sequence is not relevant here). The nucleotide base position is noted in the Tables as that site to be cleaved by the designated type of ribozyme. While mouse and human sequences can be screened and enzymatic nucleic acid molecules thereafter designed, the human targeted sequences are of most utility. However, as discussed in Stinchcomb et al., WO 95/23225, mouse targeted enzymatic nucleic acid can be useful to test efficacy of action of the enzymatic nucleic acid molecule prior to testing in humans. The nucleotide base position is noted in the Tables as that site to be cleaved by the designated type of enzymatic nucleic acid. Similarly, antisense nucleic acid molecules, siRNA, and/or siNA molecules of the invention can be designed to target sequences shown in the Tables herein or sequences derived from Accession Numbers herein.

[0155] Enzymatic nucleic acid molecules are designed that bind and cleave target RNA in a sequence-specific manner, whereas antisense and siRNA/siNA molecules are designed to be complementary to the target sequences. The nucleic acid molecules can be individually analyzed by computer folding (Jaeger et al., 1989 Proc. Natl. Acad. Sci. USA, 86, 7706) to assess whether the nucleic acid sequences fold into the appropriate secondary structure or if secondary structure will interfere with acitivity (eg. siRNA/siNA and antisense sequences). Those nucleic acid molecules with unfavorable intramolecular interactions are eliminated from consideration. Varying binding arm lengths or overall sequence lengths can be chosen to optimize activity.

[0156] In a non-limiting example, referring to FIG. 6, mRNA was screened for accessible cleavage sites by the method described generally in Draper et al., PCT WO93/23569, hereby incorporated by reference herein. Briefly, DNA oligonucleotides complementary to potential hammerhead or hairpin ribozyme cleavage sites were synthesized. A polymerase chain reaction was used to generate substrates for T7 RNA polymerase transcription from human and mouse flt-1, KDR and/or flk-1 cDNA clones. Labeled RNA transcripts were synthesized in vitro from the templates. The oligonucleotides and the labeled transcripts were annealed, RNAseH was added and the mixtures were incubated for the designated times at 37° C. Reactions were stopped and RNA separated on sequencing polyacrylamide gels. The percentage of the substrate cleaved was determined by autoradiographic quantitation using a PhosphorImaging system. From these data, antisense oligonucleotides, and ribozymes, such as hammerhead or hairpin ribozyme sites are chosen as the most accessible.

[0157] Ribozymes of the hammerhead or hairpin motif were designed to anneal to various sites in the mRNA message. The binding arms are complementary to the target site sequences described above. The ribozymes were chemically synthesized. The method of synthesis used follows the procedure for normal RNA synthesis as described below and in Usman et al., 1987 J. Am. Chem. Soc., 109, 7845; Scaringe et al., 1990 Nucleic Acids Res., 18, 5433; and Wincott et al., 1995 Nucleic Acids Res. 23, 2677-2684.

### Synthesis of Nucleic Acid Molecules

[0158] Synthesis of nucleic acids greater than 100 nucleotides in length is difficult using automated methods, and the therapeutic cost of such molecules is prohibitive. In this invention, small nucleic acid motifs (“small refers to nucleic acid motifs no more than 100 nucleotides in length, preferably no more than 80 nucleotides in length, and most preferably no more than 50 nucleotides in length; e.g., siRNA/siNA, antisense oligonucleotides, enzymatic nucleic acid molecules) are preferably used for exogenous delivery. The simple structure of these molecules increases the ability of the nucleic acid to invade targeted regions of RNA structure. Exemplary molecules of the instant invention were chemically synthesized, and others can similarly be synthesized. Oligodeoxyribonucleotides were synthesized using standard protocols as described in Caruthers et al., 1992, Methods in Enzymology 211, 3-19, and is incorporated herein by reference.

[0159] The method of synthesis used for normal RNA including certain nucleic acid molecules of the invention follows the procedure as described in Usman et al., 1987 J. Am. Chem. Soc., 109, 7845; Scaringe et al., 1990 Nucleic Acids Res., 18, 5433; and Wincott et al., 1995 Nucleic Acids Res. 23, 2677-2684 and makes use of common nucleic acid protecting and coupling groups, such as dimethoxytrityl at the 5′-end, and phosphoramidites at the 3′-end. In a non-limiting example, small scale syntheses were conducted on a 394 Applied Biosystems, Inc. synthesizer using a 0.2 μmol scale protocol with a 7.75 min coupling step for alkylsilyl protected nucleotides and a 2.5 min coupling step for 2′-O-methylated nucleotides. Table XI outlines the amounts and the contact times of the reagents used in the synthesis cycle. Alternatively, syntheses at the 0.2 μmol scale can be done on a 96-well plate synthesizer, such as the instrument produced by Protogene (Palo Alto, Calif.) with minimal modification to the cycle. A 15-fold excess (31 μL of 0.1 M=3.1 μmol) of phosphoramidite and a 38.7-fold excess of S-ethyl tetrazole (31 μL of 0.25 M=7.75 μmol) relative to polymer-bound 5′-hydroxyl was used in each coupling cycle. Average coupling yields on the 394 Applied Biosystems, Inc. synthesizer, determined by colorimetric quantitation of the trityl fractions, were 97.5-99%. Other oligonucleotide synthesis reagents for the 394 Applied Biosystems, Inc. synthesizer; detritylation solution was 3% TCA in methylene chloride (ABI); capping was performed with 16% N-methyl imidazole in THF (ABI) and 10% acetic anhydride/10% 2,6-lutidine in THF (ABI); oxidation solution was 16.9 mM I₂, 49 mM pyridine, 9% water in THF (PERSEPTIVE™). Burdick & Jackson Synthesis Grade acetonitrile was used directly from the reagent bottle. S-Ethyltetrazole solution (0.25 M in acetonitrile) was made up from the solid obtained from American International Chemical, Inc.

[0160] Deprotection of the RNA was performed using either a two-pot or one-pot protocol. For the two-pot protocol, the polymer-bound trityl-on oligoribonucleotide was transferred to a 4 mL glass screw top vial and suspended in a solution of 40% aq. methylamine (1 mL) at 65° C. for 10 min. After cooling to −20° C., the supernatant was removed from the polymer support. The support was washed three times with 1.0 mL of EtOH:MeCN:H2O/3:1:1, vortexed and the supernatant was then added to the first supernatant. The combined supernatants, containing the oligoribonucleotide, were dried to a white powder. The base deprotected oligoribonucleotide was resuspended in anhydrous TEA/HF/NMP solution (300 μL of a solution of 1.5 mL N-methylpyrrolidinone, 750 μL TEA and 1 mL TEA.3HF to provide a 1.4 M HF concentration) and heated to 65° C. After 1.5 h, the oligomer was quenched with 1.5 M NH₄HCO₃.

[0161] Alternatively, for the one-pot protocol, the polymer-bound trityl-on oligoribonucleotide was transferred to a 4 mL glass screw top vial and suspended in a solution of 33% ethanolic methylamine/DMSO:1/1 (0.8 mL) at 65° C. for 15 min. The vial was brought to r.t. TEA.3HF (0.1 mL) was added and the vial was heated at 65° C. for 15 min. The sample was cooled at −20° C. and then quenched with 1.5 M NH₄HCO₃.

[0162] For purification of the trityl-on oligomers, the quenched NH₄HCO₃ solution was loaded onto a C-18 containing cartridge that had been prewashed with acetonitrile followed by 50 mM TEAA. After washing the loaded cartridge with water, the RNA was detritylated with 0.5% TFA for 13 min. The cartridge was then washed again with water, salt exchanged with 1 M NaCl and washed with water again. The oligonucleotide was then eluted with 30% acetonitrile.

[0163] Inactive hammerhead ribozymes or binding attenuated control (BAC) oligonucleotides) were synthesized by substituting a U for G₅ and a U for A₁₄ (numbering from Hertel, K. J., et al., 1992, Nucleic Acids Res., 20, 3252).

[0164] The average stepwise coupling yields were >98% (Wincott et al., 1995 Nucleic Acids Res. 23, 2677-2684). Those of ordinary skill in the art will recognize that the scale of synthesis can be adapted to be larger or smaller than the example described above including but not limited to 96 well format, all that is important is the ratio of chemicals used in the reaction.

[0165] Alternatively, the nucleic acid molecules of the present invention can be synthesized separately and joined together by ligation (Moore et al., 1992, Science 256, 9923; Draper et al., International PCT publication No. WO 93/23569; Shabarova et al., 1991, Nucleic Acids Research 19, 4247)

[0166] Nucleic acid molecules are modified extensively to enhance stability by modification with nuclease resistant groups, for example, 2′-amino, 2′-C-allyl, 2′-fluoro, 2′-O-methyl, 2′-H (for a review see Usman and Cedergren, 1992 TIBS 17, 34; Usman et al., 1994 Nucleic Acids Symp. Ser. 31, 163). Nucleic acid molecules are purified by gel electrophoresis using general methods or are purified by high pressure liquid chromatography (HPLC; See Wincott et al., Supra, the totality of which is hereby incorporated herein by reference) and are resuspended in water.

[0167] For example, the sequences of the enzymatic nucleic acid molecules that are chemically synthesized, useful in this study, are shown in Tables II to IX, XIV-XIX, XXII, and XXIII. Those in the art will recognize that these sequences are representative only of many more such sequences where the enzymatic portion of the enzymatic nucleic acid (all but the binding arms) is altered to affect activity. Stem-loop IV sequence of hairpin ribozymes listed in, for example, Table III (5′-CACGUUGUG-3′) can be altered (substitution, deletion, and/or insertion) to contain any sequence, provided a minimum of two base-paired stem structure can form. Preferably, no more than 200 bases are inserted at these locations. The sequences listed in Tables II to X, XII-XIX, XXII, and XXIII may be formed of ribonucleotides or other nucleotides or non-nucleotides. Such molecules with enzymatic activity are equivalent to the enzymatic nucleic acids described specifically in the Tables.

### Optimizing Activity of the Nucleic Acid Molecule of the Invention.

[0168] Nucleic acid activity can be optimized as described by Stinchcomb et al., supra. The details will not be repeated here, but include altering the length of the nucleic acid binding arms (stems I and III, see FIG. 2c), or chemically synthesizing enzymatic nucleic acid with modifications that prevent their degradation by serum ribonucleases (see e.g., Eckstein et al., International Publication No. WO 92/07065; Perrault et al., 1990 Nature 344, 565; Pieken et al., 1991 Science 253, 314; Usman and Cedergren, 1992 Trends in Biochem. Sci. 17, 334; Usman et al., International Publication No. WO 93/15187; Rossi et al., International Publication No. WO 91/03162; Beigelman et al., 1995 J. Biol. Chem. in press; as well as Sproat, U.S. Pat. No. 5,334,711 which describe various chemical modifications that can be made to the sugar moieties of enzymatic RNA molecules). Modifications which enhance their efficacy in cells, and removal of stem II bases to shorten RNA synthesis times and reduce chemical requirements are desired. (All these publications are hereby incorporated by reference herein).

[0169] There are several examples in the art describing sugar, base and phosphate modifications that can be introduced into enzymatic nucleic acid molecules without significantly effecting catalysis and with significant enhancement in their nuclease stability and efficacy. For example, enzymatic nucleic acid molecules are modified to enhance stability and/or enhance catalytic activity by modification with nuclease resistant groups, for example, 2′-amino, 2′-C-allyl, 2′-fluoro, 2′-O-methyl, 2′-H, nucleotide base modifications (for a review see Usman and Cedergren, 1992 TIBS 17, 34; Usman et al., 1994 Nucleic Acids Symp. Ser. 31, 163; Burgin et al., 1996 Biochemistry 35, 14090). Sugar modification of enzymatic nucleic acid molecules have been extensively described in the art (see Eckstein et al., International Publication PCT No. WO 92/07065; Perrault et al. Nature 1990, 344, 565-568; Pieken et al. Science 1991, 253, 314-317; Usman and Cedergren, Trends in Biochem. Sci. 1992, 17, 334-339; Usman et al. International Publication PCT No. WO 93/15187; Sproat, U.S. Pat. No. 5,334,711 and Beigelman et al., 1995J. Biol. Chem. 270, 25702; all of the references are hereby incorporated in their totality by reference herein). Such publications describe general methods and strategies to determine the location of incorporation of sugar, base and/or phosphate modifications and the like into enzymatic nucleic acid without inhibiting catalysis, and are incorporated by reference herein. In view of such teachings, similar modifications can be used as described herein to modify the nucleic acid catalysts of the instant invention.

[0170] Nucleic acid molecules having chemical modifications which maintain or enhance activity are provided. Such nucleic acid is also generally more resistant to nucleases than unmodified nucleic acid. Thus, in a cell and/or in vivo the activity may not be significantly lowered. As exemplified herein such enzymatic nucleic acid molecules are useful in a cell and/or in vivo even if activity over all is reduced 10 fold (Burgin et al., 1996, Biochemistry, 35, 14090). Such enzymatic nucleic acid molecules herein are said to “maintain” the enzymatic activity of an all RNA enzymatic nucleic acid molecules.

[0171] Therapeutic nucleic acid molecules (e.g., enzymatic nucleic acid molecules, siRNA/siNA, and antisense nucleic acid molecules) delivered exogenously must optimally be stable within cells until translation of the target RNA has been inhibited long enough to reduce the levels of the undesirable protein. This period of time varies between hours to days depending upon the disease state. Clearly, these nucleic acid molecules must be resistant to nucleases in order to function as effective intracellular therapeutic agents. Improvements in the chemical synthesis of nucleic acid molecules described in the instant invention and in the art have expanded the ability to modify nucleic acid molecules by introducing nucleotide modifications to enhance their nuclease stability as described above.

[0172] By “enhanced enzymatic activity” is meant to include activity measured in cells and/or in vivo where the activity is a reflection of both catalytic activity and enzymatic nucleic acid stability. In this invention, the product of these properties is increased or not significantly (less that 10 fold) decreased in vivo compared to an all RNA enzymatic nucleic acid molecule.

[0173] In one embodiment, the nucleic acid molecules comprises a 5′ and/or a 3′-cap structure.

[0174] By “cap structure” is meant chemical modifications, which have been incorporated at the terminus of the oligonucleotide (see for example Wincott et al., WO 97/26270, incorporated by reference herein). These terminal modifications protect the nucleic acid molecule from exonuclease degradation, and may help in delivery and/or localization within a cell. The cap may be present at the 5′-terminus (5′-cap) or at the 3′-terminus (3′-cap) or may be present on both terminus. In non-limiting examples: the 5′-cap is selected from the group comprising inverted abasic residue (moiety), 4′,5′-methylene nucleotide; 1-(beta-D-erythrofuranosyl) nucleotide, 4′-thio nucleotide, carbocyclic nucleotide; 1,5-anhydrohexitol nucleotide; L-nucleotides; alpha-nucleotides; modified base nucleotide; phosphorodithioate linkage; threo-pentofuranosyl nucleotide; acyclic 3′,4′-seco nucleotide; acyclic 3,4-dihydroxybutyl nucleotide; acyclic 3,5-dihydroxypentyl nucleotide, 3′-3′-inverted nucleotide moiety; 3′-3′-inverted abasic moiety; 3′-2′-inverted nucleotide moiety; 3′-2′-inverted abasic moiety; 1,4-butanediol phosphate; 3′-phosphoramidate; hexylphosphate; aminohexyl phosphate; 3′-phosphate; 3′-phosphorothioate; phosphorodithioate; or bridging or non-bridging methylphosphonate moiety (for more details see Beigelman et al., International PCT publication No. WO 97/26270, incorporated by reference herein).

[0175] In yet another embodiment, the 3′-cap is selected from a group comprising, 4′,5′-methylene nucleotide; 1-(beta-D-erythrofuranosyl) nucleotide; 4′-thio nucleotide, carbocyclic nucleotide; 5′-amino-alkyl phosphate; 1,3-diamino-2-propyl phosphate, 3-aminopropyl phosphate; 6-aminohexyl phosphate; 1,2-aminododecyl phosphate; hydroxypropyl phosphate; 1,5-anhydrohexitol nucleotide; L-nucleotide; alpha-nucleotide; modified base nucleotide; phosphorodithioate; threo-pentofuranosyl nucleotide; acyclic 3′,4′-seco nucleotide; 3,4-dihydroxybutyl nucleotide; 3,5-dihydroxypentyl nucleotide, 5′-5′-inverted nucleotide moeity; 5′-5′-inverted abasic moeity; 5′-phosphoramidate; 5′-phosphorothioate; 1,4-butanediol phosphate; 5′-amino; bridging and/or non-bridging 5′-phosphoramidate, phosphorothioate and/or phosphorodithioate, bridging or non bridging methylphosphonate and 5′-mercapto moeities (for more details see Beaucage and Iyer, 1993, Tetrahedron 49, 1925; incorporated by reference herein).

[0176] By the term “non-nucleotide” is meant any group or compound which can be incorporated into a nucleic acid chain in the place of one or more nucleotide units, including either sugar and/or phosphate substitutions, and allows the remaining bases to exhibit their enzymatic activity. The group or compound is abasic in that it does not contain a commonly recognized nucleotide base, such as adenosine, guanine, cytosine, uracil or thymine.

[0177] By “nucleotide” as used herein is as recognized in the art to include natural bases (standard), and modified bases well known in the art. Such bases are generally located at the 1′ position of a sugar moiety. A nucleotide generally comprises a base, sugar and a phosphate group. The nucleotide may also be abasic, i.e., lacking a base. The nucleotides can be unmodified or modified at the sugar, phosphate and/or base moiety, (also referred to interchangeably as nucleotide analogs, modified nucleotides, non-natural nucleotides, non-standard nucleotides and other; see for example, Usman and McSwiggen, supra; Eckstein et al., International PCT Publication No. WO 92/07065; Usman et al., International PCT Publication No. WO 93/15187; all hereby incorporated by reference herein). Several examples of modified nucleic acid bases are known in the art and has recently been summarized by Limbach et al., 1994, Nucleic Acids Res. 22, 2183. Some of the non-limiting examples of base modifications that can be introduced into enzymatic nucleic acids without significantly effecting their catalytic activity include, inosine, purine, pyridin-4-one, pyridin-2-one, phenyl, pseudouracil, 2,4,6-trimethoxy benzene, 3-methyl uracil, dihydrouridine, naphthyl, aminophenyl, 5-alkylcytidines (e.g., 5-methylcytidine), 5-alkyluridines (e.g., ribothymidine), 5-halouridine (e.g., 5-bromouridine) or 6-azapyrimidines or 6-alkylpyrimidines (e.g. 6-methyluridine) and others (Burgin et al., 1996, Biochemistry, 35, 14090).

[0178] By “modified bases” in this aspect is meant nucleotide bases other than adenine, guanine, cytosine and uracil at 1′ position or their equivalents; such bases may be used within the catalytic core of the enzyme and/or in the substrate-binding regions.

[0179] By “abasic” is meant sugar moieties lacking a base or having other chemical groups in place of a base at the 1′ position.

[0180] By “unmodified nucleoside” is meant one of the bases adenine, cytosine, guanine, uracil joined to the 1′ carbon of β-D-ribo-furanose.

[0181] By “modified nucleoside” is meant any nucleotide base that contains a modification in the chemical structure of an unmodified nucleotide base, sugar and/or phosphate.

[0182] In connection with 2′-modified nucleotides as described for the present invention, by “amino” is meant 2′-NH₂ or 2′-O—NH₂, which can be modified or unmodified. Such modified groups are described, for example, in Eckstein et al., U.S. Pat. No. 5,672,695 and Matulic-Adamic et al., WO 98/28317, respectively, which are both incorporated by reference in their entireties.

[0183] Various modifications to nucleic acid (e.g., antisense and ribozyme) structure can be made to enhance the utility of these molecules. Such modifications enhance shelf-life, half-life in vitro, stability, and ease of introduction of such oligonucleotides to the target site, e.g., to enhance penetration of cellular membranes, and confer the ability to recognize and bind to targeted cells.

[0184] Use of these molecules can lead to better treatment of the disease progression by affording the possibility of combination therapies (e.g., multiple enzymatic nucleic acid molecules targeted to different genes, enzymatic nucleic acid molecules coupled with known small molecule inhibitors, or intermittent treatment with combinations of enzymatic nucleic acid molecules (including different ribozyme motifs) and/or other chemical or biological molecules). The treatment of subjects with nucleic acid molecules can also include combinations of different types of nucleic acid molecules. Therapies can be devised which include a mixture of enzymatic nucleic acid molecules (including different ribozyme motifs), antisense and/or 2-5A chimera molecules to one or more targets to alleviate symptoms of a disease.

### Administration of Nucleic Acid Molecules

[0185] Sullivan, et al., supra, describes the general methods for delivery of nucleic acid molecules. Nucleic acid molecules of the invention can be administered to cells by a variety of methods known to those familiar to the art, including, but not restricted to, encapsulation in liposomes, by iontophoresis, or by incorporation into other vehicles, such as hydrogels, cyclodextrins, biodegradable nanocapsules, and bioadhesive microspheres. For some indications, nucleic acid molecules can be directly delivered ex vivo to cells or tissues with or without the aforementioned vehicles. Alternatively, the nucleic acid/vehicle combination is locally delivered by direct injection or by use of a catheter, infusion pump or stent. Other routes of delivery include, but are not limited to, intravascular, intramuscular, subcutaneous or joint injection, aerosol inhalation, oral (tablet or pill form), topical, systemic, ocular, intraperitoneal and/or intrathecal delivery. More detailed descriptions of nucleic acid delivery and administration are provided in Sullivan et al., supra and Draper et al., supra which have been incorporated by reference herein.

[0186] Methods for the delivery of nucleic acid molecules is described in Akhtar et al., 1992, Trends Cell Bio., 2, 139; and Delivery Strategies for Antisense Oligonucleotide Therapeutics, ed. Akhtar, 1995 which are both incorporated herein by reference. Sullivan et al., PCT WO 94/02595, further describes the general methods for delivery of enzymatic RNA molecules. These protocols can be utilized for the delivery of virtually any nucleic acid molecule. Nucleic acid molecules can be administered to cells by a variety of methods known to those familiar to the art, including, but not restricted to, encapsulation in liposomes, by iontophoresis, or by incorporation into other vehicles, such as hydrogels, cyclodextrins, biodegradable nanocapsules, and bioadhesive microspheres. For some indications, nucleic acid molecules can be directly delivered ex vivo to cells or tissues with or without the aforementioned vehicles. Alternatively, the nucleic acid/vehicle combination is locally delivered by direct injection or by use of a catheter, infusion pump or stent. Other routes of delivery include, but are not limited to, intravascular, intramuscular, subcutaneous or joint injection, aerosol inhalation, oral (tablet or pill form), topical, systemic, ocular, intraperitoneal and/or intrathecal delivery. More detailed descriptions of nucleic acid delivery and administration are provided in Sullivan et al., supra and Draper et al., PCT WO93/23569 which have been incorporated by reference herein.

[0187] The nucleic acid molecules of the instant invention can be used as pharmaceutical agents. Pharmaceutical agents prevent, inhibit the occurrence, or treat (alleviate a symptom to some extent, preferably all of the symptoms) of a disease state in a subject.

[0188] The nucleic acid molecules of the invention can be administered (e.g., RNA, DNA or protein) and introduced into a subject by any standard means, with or without stabilizers, buffers, and the like, to form a pharmaceutical composition. When it is desired to use a liposome delivery mechanism, standard protocols for formation of liposomes can be followed. The compositions of the present invention may also be formulated and used as tablets, capsules or elixirs for oral administration; suppositories for rectal administration; sterile solutions; suspensions for injectable administration; and the like.

[0189] The present invention also includes pharmaceutically acceptable formulations of the compounds described. These formulations include salts of the above compounds, e.g., acid addition salts, for example, salts of hydrochloric, hydrobromic, acetic acid, and benzene sulfonic acid.

[0190] A pharmacological composition or formulation refers to a composition or formulation in a form suitable for administration, e.g., systemic administration, into a cell or subject, preferably a human. Suitable forms, in part, depend upon the use or the route of entry, for example oral, transdermal, or by injection. Such forms should not prevent the composition or formulation to reach a target cell (i.e., a cell to which the negatively charged polymer is desired to be delivered to). For example, pharmacological compositions injected into the blood stream should be soluble. Other factors are known in the art, and include considerations such as toxicity and forms which prevent the composition or formulation from exerting its effect.

[0191] By “systemic administration” is meant in vivo systemic absorption or accumulation of drugs in the blood stream followed by distribution throughout the entire body. Administration routes which lead to systemic absorption include, without limitations: intravenous, subcutaneous, intraperitoneal, inhalation, oral, intrapulmonary and intramuscular. Each of these administration routes expose the desired negatively charged polymers, e.g., nucleic acids, to an accessible diseased tissue. The rate of entry of a drug into the circulation has been shown to be a function of molecular weight or size. The use of a liposome or other drug carrier comprising the compounds of the instant invention can potentially localize the drug, for example, in certain tissue types, such as the tissues of the reticular endothelial system (RES). A liposome formulation which can facilitate the association of drug with the surface of cells, such as, lymphocytes and macrophages is also useful. This approach may provide enhanced delivery of the drug to target cells by taking advantage of the specificity of macrophage and lymphocyte immune recognition of abnormal cells, such as the cancer cells.

[0192] The invention also features the use of a composition comprising surface-modified liposomes containing poly (ethylene glycol) lipids (PEG-modified, or long-circulating liposomes or stealth liposomes). These formulations offer a method for increasing the accumulation of drugs in target tissues. This class of drug carriers resists opsonization and elimination by the mononuclear phagocytic system (MPS or RES), thereby enabling longer blood circulation times and enhanced tissue exposure for the encapsulated drug (Lasic et al. Chem. Rev. 1995, 95, 2601-2627; Ishiwata et al., Chem. Pharm. Bull. 1995, 43, 1005-1011). Such liposomes have been shown to accumulate selectively in tumors, presumably by extravasation and capture in the neovascularized target tissues (Lasic et al., Science 1995, 267, 1275-1276; Oku et al., 1995, Biochim. Biophys. Acta, 1238, 86-90). Long-circulating liposomes enhance the pharmacokinetics and pharmacodynamics of DNA and RNA, particularly compared to conventional cationic liposomes which are known to accumulate in tissues of the MPS (Liu et al., J. Biol. Chem. 1995, 42, 24864-24870; Choi et al., International PCT Publication No. WO 96/10391; Ansell et al., International PCT Publication No. WO 96/10390; Holland et al., International PCT Publication No. WO 96/10392; all of these are incorporated by reference herein). Long-circulating liposomes are also likely to protect drugs from nuclease degradation to a greater extent compared to cationic liposomes, based on their ability to avoid accumulation in metabolically aggressive MPS tissues such as the liver and spleen. All of these references are incorporated by reference herein.

[0193] The present invention also includes compositions prepared for storage or administration which include a pharmaceutically effective amount of the desired compounds in a pharmaceutically acceptable carrier or diluent. Acceptable carriers or diluents for therapeutic use are well known in the pharmaceutical art, and are described, for example, in Remington's Pharmaceutical Sciences, Mack Publishing Co. (A. R. Gennaro edit. 1985) hereby incorporated by reference herein. For example, preservatives, stabilizers, dyes and flavoring agents may be provided. Id. at 1449. These include sodium benzoate, sorbic acid and esters of p-hydroxybenzoic acid. In addition, antioxidants and suspending agents can be used. Id.

[0194] A pharmaceutically effective dose is that dose required to prevent, inhibit the occurrence, or treat (alleviate a symptom to some extent, preferably all of the symptoms) of a disease state. The pharmaceutically effective dose depends on the type of disease, the composition used, the route of administration, the type of mammal being treated, the physical characteristics of the specific mammal under consideration, concurrent medication, and other factors which those skilled in the medical arts will recognize. Generally, an amount between 0.1 mg/kg and 100 mg/kg body weight/day of active ingredients is administered dependent upon potency of the negatively charged polymer.

[0195] The nucleic acid molecules of the invention and formulations thereof can be administered orally, topically, parenterally, by inhalation or spray or rectally in dosage unit formulations containing conventional non-toxic pharmaceutically acceptable carriers, adjuvants and vehicles. The term parenteral as used herein includes percutaneous, subcutaneous, intravascular (e.g., intravenous), intramuscular, or intrathecal injection or infusion techniques and the like. In addition, there is provided a pharmaceutical formulation comprising a nucleic acid molecule of the invention and a pharmaceutically acceptable carrier. One or more nucleic acid molecules of the invention can be present in association with one or more non-toxic pharmaceutically acceptable carriers and/or diluents and/or adjuvants, and if desired other active ingredients. The pharmaceutical compositions containing nucleic acid molecules of the invention can be in a form suitable for oral use, for example, as tablets, troches, lozenges, aqueous or oily suspensions, dispersible powders or granules, emulsion, hard or soft capsules, or syrups or elixirs.

[0196] Compositions intended for oral use can be prepared according to any method known to the art for the manufacture of pharmaceutical compositions and such compositions can contain one or more such sweetening agents, flavoring agents, coloring agents or preservative agents in order to provide pharmaceutically elegant and palatable preparations. Tablets contain the active ingredient in admixture with non-toxic pharmaceutically acceptable excipients that are suitable for the manufacture of tablets. These excipients can be for example, inert diluents, such as calcium carbonate, sodium carbonate, lactose, calcium phosphate or sodium phosphate; granulating and disintegrating agents, for example, corn starch, or alginic acid; binding agents, for example starch, gelatin or acacia, and lubricating agents, for example magnesium stearate, stearic acid or talc. The tablets can be uncoated or they can be coated by known techniques. In some cases such coatings can be prepared by known techniques to delay disintegration and absorption in the gastrointestinal tract and thereby provide a sustained action over a longer period. For example, a time delay material such as glyceryl monosterate or glyceryl distearate can be employed.

[0197] Formulations for oral use can also be presented as hard gelatin capsules wherein the active ingredient is mixed with an inert solid diluent, for example, calcium carbonate, calcium phosphate or kaolin, or as soft gelatin capsules wherein the active ingredient is mixed with water or an oil medium, for example peanut oil, liquid paraffin or olive oil.

[0198] Aqueous suspensions contain the active materials in admixture with excipients suitable for the manufacture of aqueous suspensions. Such excipients are suspending agents, for example sodium carboxymethylcellulose, methylcellulose, hydropropyl-methylcellulose, sodium alginate, polyvinylpyrrolidone, gum tragacanth and gum acacia; dispersing or wetting agents can be a naturally-occurring phosphatide, for example, lecithin, or condensation products of an alkylene oxide with fatty acids, for example polyoxyethylene stearate, or condensation products of ethylene oxide with long chain aliphatic alcohols, for example heptadecaethyleneoxycetanol, or condensation products of ethylene oxide with partial esters derived from fatty acids and a hexitol such as polyoxyethylene sorbitol monooleate, or condensation products of ethylene oxide with partial esters derived from fatty acids and hexitol anhydrides, for example polyethylene sorbitan monooleate. The aqueous suspensions can also contain one or more preservatives, for example ethyl, or n-propyl p-hydroxybenzoate, one or more coloring agents, one or more flavoring agents, and one or more sweetening agents, such as sucrose or saccharin.

[0199] Oily suspensions can be formulated by suspending the active ingredients in a vegetable oil, for example arachis oil, olive oil, sesame oil or coconut oil, or in a mineral oil such as liquid paraffin. The oily suspensions can contain a thickening agent, for example beeswax, hard paraffin or cetyl alcohol. Sweetening agents and flavoring agents can be added to provide palatable oral preparations. These compositions can be preserved by the addition of an anti-oxidant such as ascorbic acid.

[0200] Dispersible powders and granules suitable for preparation of an aqueous suspension by the addition of water provide the active ingredient in admixture with a dispersing or wetting agent, suspending agent and one or more preservatives. Suitable dispersing or wetting agents or suspending agents are exemplified by those already mentioned above. Additional excipients, for example sweetening, flavoring and coloring agents, can also be present.

[0201] Pharmaceutical compositions of the invention can also be in the form of oil-in-water emulsions. The oily phase can be a vegetable oil or a mineral oil or mixtures of these. Suitable emulsifying agents can be naturally-occurring gums, for example gum acacia or gum tragacanth, naturally-occurring phosphatides, for example soy bean, lecithin, and esters or partial esters derived from fatty acids and hexitol, anhydrides, for example sorbitan monooleate, and condensation products of the said partial esters with ethylene oxide, for example polyoxyethylene sorbitan monooleate. The emulsions can also contain sweetening and flavoring agents.

[0202] Syrups and elixirs can be formulated with sweetening agents, for example glycerol, propylene glycol, sorbitol, glucose or sucrose. Such formulations can also contain a demulcent, a preservative and flavoring and coloring agents. The pharmaceutical compositions can be in the form of a sterile injectable aqueous or oleaginous suspension. This suspension can be formulated according to the known art using those suitable dispersing or wetting agents and suspending agents that have been mentioned above. The sterile injectable preparation can also be a sterile injectable solution or suspension in a non-toxic parentally acceptable diluent or solvent, for example as a solution in 1,3-butanediol. Among the acceptable vehicles and solvents that can be employed are water, Ringer's solution and isotonic sodium chloride solution. In addition, sterile, fixed oils are conventionally employed as a solvent or suspending medium. For this purpose any bland fixed oil can be employed including synthetic mono- or diglycerides. In addition, fatty acids such as oleic acid find use in the preparation of injectables.

[0203] The nucleic acid molecules of the invention can also be administered in the form of suppositories, e.g., for rectal administration of the drug. These compositions can be prepared by mixing the drug with a suitable non-irritating excipient that is solid at ordinary temperatures but liquid at the rectal temperature and will therefore melt in the rectum to release the drug. Such materials include cocoa butter and polyethylene glycols.

[0204] Nucleic acid molecules of the invention can be administered parenterally in a sterile medium. The drug, depending on the vehicle and concentration used, can either be suspended or dissolved in the vehicle. Advantageously, adjuvants such as local anesthetics, preservatives and buffering agents can be dissolved in the vehicle.

[0205] Dosage levels of the order of from about 0.1 mg to about 140 mg per kilogram of body weight per day are useful in the treatment of the above-indicated conditions (about 0.5 mg to about 7 g per subject per day). The amount of active ingredient that can be combined with the carrier materials to produce a single dosage form varies depending upon the host treated and the particular mode of administration. Dosage unit forms generally contain between from about 1 mg to about 500 mg of an active ingredient.

[0206] It is understood that the specific dose level for any particular subject depends upon a variety of factors including the activity of the specific compound employed, the age, body weight, general health, sex, diet, time of administration, route of administration, and rate of excretion, drug combination and the severity of the particular disease undergoing therapy.

[0207] For administration to non-human animals, the composition can also be added to the animal feed or drinking water. It can be convenient to formulate the animal feed and drinking water compositions so that the animal takes in a therapeutically appropriate quantity of the composition along with its diet. It can also be convenient to present the composition as a premix for addition to the feed or drinking water.

[0208] The nucleic acid molecules of the present invention can also be administered to a subject in combination with other therapeutic compounds to increase the overall therapeutic effect. The use of multiple compounds to treat an indication can increase the beneficial effects while reducing the presence of side effects.

[0209] Another means of accumulating high concentrations of a nucleic acid molecule of the invention (e.g., ribozyme or antisense) within cells is to incorporate the nucleic acid-encoding sequences into a DNA or RNA expression vector. Transcription of the nucleic acid sequences are driven from a promoter for eukaryotic RNA polymerase I (pol I), RNA polymerase II (pol II), or RNA polymerase III (pol III). Transcripts from pol II or pol III promoters will be expressed at high levels in all cells; the levels of a given pol II promoter in a given cell type will depend on the nature of the gene regulatory sequences (enhancers, silencers, etc.) present nearby. Prokaryotic RNA polymerase promoters are also used, providing that the prokaryotic RNA polymerase enzyme is expressed in the appropriate cells (Elroy-Stein and Moss, 1990 Proc. Natl. Acad. Sci. USA, 87, 6743-7; Gao and Huang 1993 Nucleic Acids Res., 21, 2867-72; Lieber et al., 1993 Methods Enzymol., 217, 47-66; Zhou et al., 1990 Mol. Cell. Biol., 10, 4529-37; Thompson et al., 1995 supra). Several investigators have demonstrated that enzymatic nucleic acid or antisese expressed from such promoters can function in mammalian cells (e.g. Izant and Weintraub, 1985 Science 229, 345; McGarry and Lindquist, 1986 Proc. Natl. Acad. Sci. USA 83, 399; Kashani-Sabet et al., 1992 Antisense Res. Dev., 2, 3-15; Ojwang et al., 1992 Proc. Natl. Acad. Sci. USA, 89, 10802-6; Chen et al., 1992 Nucleic Acids Res., 20, 4581-9; Yu et al., 1993 Proc. Natl. Acad. Sci. USA, 90, 6340-4; L'Huillier et al., 1992 EMBO J. 11, 4411-8; Lisziewicz et al., 1993 Proc. Natl. Acad. Sci. U.S.A., 90, 8000-4; Thompson et al., 1995 Nucleic Acids Res. 23, 2259). The above nucleic acid transcription units can be incorporated into a variety of vectors for introduction into mammalian cells, including but not restricted to, plasmid DNA vectors, viral DNA vectors (such as adenovirus or adeno-associated virus vectors), or viral RNA vectors (such as retroviral or alphavirus vectors).

[0210] In one embodiment of the invention, a transcription unit expressing an enzymatic nucleic acid that cleaves RNAs that encode flt-1, KDR and/or flk-1 are inserted into a plasmid DNA vector or an adenovirus or adeno-associated virus DNA viral vector or a retroviral RNA vector. Viral vectors have been used to transfer genes and lead to either transient or long term gene expression (Zabner et al., 1993 Cell 75, 207; Carter, 1992 Curr. Opi. Biotech. 3, 533). The adenovirus, AAV or retroviral vector is delivered as recombinant viral particles. The DNA may be delivered alone or complexed with vehicles (as described for RNA above). The recombinant adenovirus or AAV or retroviral particles are locally administered to the site of treatment, e.g., through incubation or inhalation in vivo or by direct application to cells or tissues ex vivo. Retroviral vectors have also been used to express enzymatic nucleic acid in mammalian cells (Ojwang et al., 1992 supra; Thompson et al., 1995 supra).

[0211] Flt-1, KDR and/or flk-1 are attractive nucleic acid-based therapeutic targets by several criteria. The interaction between VEGF and VEGF-R is well-established. Efficacy can be tested in well-defined and predictive animal models. Finally, the disease conditions are serious and current therapies are inadequate. Whereas protein-based therapies would inhibit VEGF activity nucleic acid-based therapy provides a direct and elegant approach to directly modulate flt-1, KDR and/or flk-1 expression.

[0212] Because flt-1 and KDR mRNAs are highly homologous in certain regions, some enzymatic nucleic acid target sites are also homologous (see Table X). In this case, a single enzymatic nucleic acid can target both flt-1 and KDR mRNAs. At partially homologous sites, a single enzymatic nucleic acid can sometimes be designed to accommodate a site on both mRNAs by including G/U base pairing. For example, if there is a G present in an enzymatic nucleic acid target site in KDR mRNA at the same position there is an A in the flt-1 ribozyme target site, the enzymatic nucleic acid can be synthesized with a U at the complementary position and it will bind both to sites. The advantage of one enzymatic nucleic acid that targets both VEGF-R mRNAs is clear, especially in cases where both VEGF receptors may contribute to the progression of angiogenesis in the disease state.

[0213] “Angiogenesis” refers to formation of new blood vessels, which is an essential process in reproduction, development and wound repair. “Tumor angiogenesis” refers to the induction of the growth of blood vessels from surrounding tissue into a solid tumor. Tumor growth and tumor metastasis are dependent on angiogenesis (for a review see Folkman, 1985 supra; Folkman 1990 J. Natl. Cancer Inst., 82, 4; Folkman and Shing, 1992 J. Biol. Chem. 267, 10931).

[0214] Angiogenesis plays an important role in other diseases such as arthritis wherein new blood vessels have been shown to invade the joints and degrade cartilage (Folkman and Shing, supra).

[0215] “Retinopathy” refers to inflammation of the retina and/or degenerative condition of the retina which may lead to occlusion of the retina and eventual blindness. In “diabetic retinopathy” angiogenesis causes the capillaries in the retina to invade the vitreous resulting in bleeding and blindness which is also seen in neonatal retinopathy (for a review see Folkman, 1985 supra; Folkman 1990 supra; Folkman and Shing, 1992 supra).

[0216] The following examples further illustrate the present invention but should not be construed to limit the present invention in any way.

### Example 1

### flt-1, KDR and/or flk-1 Ribozymes

[0217] By engineering ribozyme motifs, Applicant has designed several ribozymes directed against flt-1, KDR and/or flk-1 encoded mRNA sequences. These ribozymes were synthesized with modifications that improve their nuclease resistance (Beigelman et al., 1995 J. Biol. Chem. 270, 25702) and enhance their activity in cells. The ability of ribozymes to cleave target sequences in vitro was evaluated essentially as described in Thompson et al., PCT Publication No. WO 93/23057; Draper et al., PCT Publication No. WO 95/04818.

### Example 2

### Effect of Ribozymes on the Binding of VEGF to flt-1. KDR and/or flk-1 Receptors

[0218] Several common human cell lines are available that express endogenous flt-1, KDR and/or flk-1. flt-1, KDR and/or flk-1 which can be detected easily with monoclonal antibodies. Use of appropriate fluorescent reagents and fluorescence-activated cell-sorting (FACS) permit direct quantitation of surface flt-1, KDR and/or flk-1 on a cell-by-cell basis. Active ribozymes are expected to directly reduce flt-1, KDR and/or flk-1 expression and thereby reduce VEGF binding to the cells. In this example, human umbilical cord microvascular endothelial cells were used.

### Cell Preparation:

[0219] Plates were coated with 1.5% gelatin and allowed to stand for one hour. Cells (e.g., microvascular endothelial cells derived from human umbilical cord vein) were plated at 20,000 cells/wells (24 well plate) in 200 μl growth media and incubated overnight (˜1 doubling) to yield ˜40,000 cells (75-80% confluent).

### Ribozyme Treatment:

[0220] Media was removed from cells and the cells were washed two times with 300 μl 1×PBS: Ca²⁺:Mg²⁺ mixture. A complex of 200-500 nM ribozyme and LipofectAMINE® (3:1 lipid:phosphate ratio) in 200 μl OptiMEM® (5% FBS) was added to the cells. The cells were incubated for 6 hr (equivalent to 2-3 VEGF-R turnovers).

### ¹²⁵I VEGF Binding Assay:

[0221] The assay was carried out on ice to inhibit internalization of VEGF during the experiment. The media containing the ribozyme was removed from the cells and the cells were washed twice with 300 μl 1×PBS: Ca²⁺:Mg²⁺ mixture containing 1% BSA. Appropriate ¹²⁵I VEGF solution (100,000 cpm/well, +/−10× cold 1×PBS, 1% BSA) was applied to the cells. The cells were incubated on ice for 1 hour. ¹²⁵I VEGF-containing solution was removed and the cells were washed three times with 300 μl 1×PBS: Ca²⁺:Mg²⁺ mixture containing 1% BSA. To each well 300 μl of 100 mM Tris-HCl, pH 8.0, 0.5% Triton X-100 was added and the mixture was incubated for 2 minutes. The ¹²⁵I VEGF-binding was quantitated using standard scintillation counting techniques. Percent inhibition was calculated as follows:

$$Percent Inhibition = \frac{\begin{matrix}{cpm}^{ 125} I VEGF bound by the \\ ribozyme \text{-} treated samples\end{matrix}}{{cpm}^{ 125} I VEGF bound by the Control sample} \times 100$$

### Example 3

### Effect of Hammerhead Ribozymes Targeted Against flt-1 Receptor on the Binding of VEGF

[0222] Hammerhead ribozymes targeted to twenty sites within flt-1 RNA were synthesized as described above. The sequences of the ribozymes used are shown in Table II; the length of the stem II region is 3 bp. The hammerhead ribozymes were chemically modified such that the ribozyme consists of ribose residues at five positions; U4 and U7 positions contain 2′-NH₂ modifications, the remaining nucleotide positions contain 2′-O-methyl substitutions; four nucleotides at the 5′ terminus contains phosphorothioate substitutions. Additionally, 3′ end of the ribozyme contains a 3′-3′ linked inverted abasic ribose.

[0223] Referring to FIG. 7, the effect of hammerhead ribozymes targeted against flt-1 receptor on the binding of VEGF to flt-1 on the surface of human microvascular endothelial cells is shown. The majority of the ribozymes tested were able to inhibit the expression of flt-1 and thereby were able to inhibit the binding of VEGF.

[0224] In order to determine the specificity of ribozymes targeted against flt-1 RNA, the effect of five anti-flt-1 ribozymes on the binding of VEGF, UPA (urokinase plasminogen activator) and FGF (fibroblast growth factor) to their corresponding receptors were assayed. As shown in FIG. 9, there was significant inhibition of VEGF binding to its receptors on cells treated with anti-flt-1 ribozymes. There was no specific inhibition of the binding of UPA and FGF to their corresponding receptors. These data strongly suggest that anti-flt-1 ribozymes specifically cleave flt-1 RNA and not RNAs encoding the receptors for UPA and FGF, resulting in the inhibition of flt-1 receptor expression on the surface of the cells. Thus the ribozymes are responsible for the inhibition of VEGF binding but not the binding of UPA and FGF.

### Example 4

### Effect of Hammerhead Ribozymes Targeted Against KDR Receptor on the Binding of VEGF

[0225] Hammerhead ribozymes targeted to twenty-one sites within KDR RNA were synthesized as described above. The sequences of the ribozymes used are shown in Table IV; the length of stem II region is 3 bp. The hammerhead ribozymes were chemically modified such that the ribozyme consists of ribose residues at five positions; U4 and U7 positions contain 2′-NH₂ modifications, the remaining nucleotide positions contain 2′-O-methyl substitutions; four nucleotides at the 5′ terminus contains phosphorothioate substitutions. Additionally, the 3′ end of the ribozyme contains a 3′-3′ linked inverted abasic deoxyribose.

[0226] Referring to FIG. 8, the effect of hammerhead ribozymes targeted against KDR receptor on the binding of VEGF to KDR on the surface of human microvascular endothelial cells is shown. A majority of the ribozymes tested were able to inhibit the expression of KDR and thereby were able to inhibit the binding of VEGF. As a control, the cells were treated with a ribozyme that is not targeted towards KDR RNA (irrel. RZ); there was no specific inhibition of VEGF binding. The results from this control experiment strongly suggest that the inhibition of VEGF binding observed with anti-KDR ribozymes is a ribozyme-mediated inhibition.

### Example 5

### Effect of Ribozymes Targeted Against VEGF Receptors on Cell Proliferation

### Cell Preparation:

[0227] 24-well plates were coated with 1.5% gelatin (porcine skin 300 bloom). After 1 hour, excess gelatin is washed off of the plate. Microvascular endothelial cells were plated at 5,000 cells/well (24 well plate) in 200 μl growth media. The cells were allowed to grow for ˜18 hours (˜1 doubling) to yield ˜10,000 cells (25-30% confluent).

### Ribozyme Treatment:

[0228] Media was removed from the cells, and the cells were washed two times with 300 μl 1×PBS: Ca²⁺:Mg²⁺ mixture.

[0229] For anti-flt-1 HH ribozyme experiment (FIG. 12) a complex of 500 nM ribozyme; 15 μM LFA (3:1 lipid:phosphate ratio) in 200 μl OptiMEM (5% FCS) media was added to the cells. Incubation of cells was carried out for 6 hours (equivalent to 2-3 VEGF receptor turnovers).

[0230] For anti-KDR HH ribozyme experiment (FIG. 13) a complex of 200 nM ribozyme; 5.25 μM LFA (3:1 lipid:phosphate ratio) in 200 μl OptiMEM (5% FCS) media was added to the cells. Incubation of cells was carried out for 3 hours.

### Proliferation:

[0231] After three or six hours, the media was removed from the cells and the cells were washed with 300 μl 1×PBS: Ca²⁺:Mg²⁺ mixture. Maintenance media (contains dialyzed 10% FBS) +/− VEGF or basic FGF at 10 ng/ml was added to the cells. The cells were incubated for 48 or 72 hours. The cells were trypsinized and counted (Coulter counter). Trypan blue was added on one well of each treatment as a control.

[0232] As shown in FIG. 12B, VEGF and basic FGF stimulate human microvascular endothelial cell proliferation. However, treatment of cells with 1358 HH or 4229 HH ribozymes, targeted against flt-1 mRNA, results in a significant decrease in the ability of VEGF to stimulate endothelial cell proliferation. These ribozymes do not inhibit the FGF-mediated stimulation of endothelial cell proliferation.

[0233] Human microvascular endothelial cells were also treated with hammerhead ribozymes targeted against sites 527, 730, 3702 or 3950 within the KDR mRNA. As shown in FIG. 13, all four ribozymes caused significant inhibition of VEGF-mediated induction of cell proliferation. No significant inhibition of cell proliferation was observed when the cells were treated with a hammerhead ribozyme targeted to an irrelevant RNA. Additionally, none of the ribozymes inhibited FGF-mediated stimulation of cell proliferation.

[0234] These results strongly suggest that hammerhead ribozymes targeted against either flt-1 or KDR mRNA specifically inhibit VEGF-mediated induction of endothelial cell proliferation.

### Example 6

### Effect of Antisense Oligonucleotides Targeted Against VEGF Receptors on Cell Proliferation (Calorimetric Assay)

[0235] The following are some of the reagents used in the proliferation assay:

[0236] Cells: Human aortic endothelial cells (HAEC) from Clonetics®. Cells at early passage are preferably used.

[0237] Uptake Medium: EBM (from Clonetics®); 1% L-Glutamine; 20 mM Hepes; No serum; No antibiotics.

[0238] Growth Medium: EGM (from Clonetics®); FBS to 20%; 1% L-Glutamine; 20 mM Hepes.

[0239] Cell Plating: 96-well tissue culture plates were coated with 0.2% gelatin (50 μl/well). The gelatin was incubated in the wells at room temperature for 15-30 minutes. The gelatin was removed by aspiration and the wells were washed with PBS:Ca²⁺:Mg²⁺ mixture. PBS mixture was left in the wells until cells were ready to be added. HAEC cells were detached by trypsin treatment and resuspended at 1.25×10⁴/ml in growth medium. PBS was removed from plates and 200 μl of cells (i.e. 2.5×10³ cells/well) were added to each well. The cells were allowed to grow for 48 hours before the proliferation assay.

[0240] Assay: Growth medium was removed from the wells. The cells were washed twice with PBS:Ca²⁺:Mg²⁺ mixture without antibiotics. A formulation of lipid/antisense oligonucleotide (antisense oligonucleotide is used here as a non-limiting example) complex was added to each well (100 μl/well) in uptake medium. The cells were incubated for 2-3 hours at 37° C. in a CO₂ incubator. After uptake, 100 μl/well of growth medium was added (gives final FBS concentration of 10%). After approximately 72 hours, 40 μl MTS® stock solution (made as described by manufacturer) was added to each well and incubated at 37° C. for 1-3 hours, depending on the color development. (For this assay, 2 hours was sufficient). The intensity of color formation was determined on a plate reader at 490 nM.

[0241] Phosphorothioate-substituted antisense oligodeoxynucleotides were custom synthesized by The Midland Certified Reagent Company®, Midland, Tex. Following non-limiting antisense oligodeoxynucleotides targeted against KDR RNA were used in the proliferation assay:

KDR 21 AS:
5′-GCA GCA CCT TGC TCT CCA TCC-3′
SCRAMBLED CONTROL:
5′-CTG CCA ACT TCC CAT GCC TGC-3′

[0242] As shown in FIG. 10, proliferation of HAEC cells is specifically inhibited by increasing concentrations of the phosphorothioate anti-KDR-antisense oligodeoxynucleotide. The scrambled antisense oligonucleotide is not expected to bind the KDR RNA and therefore is not expected to inhibit KDR expression. As expected, there is no detectable inhibition of proliferation of HAEC cells treated with a phosphorothioate antisense oligonucleotide with scrambled sequence.

### Example 7

### In Vitro Cleavage of flt-1 RNA by Hammerhead Ribozymes

[0243] Referring to FIG. 11A, hammerhead ribozymes (HH) targeted against sites 1358 and 4229 within the flt-1 RNA were synthesized as described above.

### RNA Cleavage Assay In Vitro:

[0244] Substrate RNA was 5′ end-labeled using [γ-³²P] ATP and T4 polynucleotide kinase (US Biochemicals). Cleavage reactions were carried out under ribozyme “excess” conditions. Trace amount (≦1 mM) of 5′ end-labeled substrate and 40 nM unlabeled ribozyme were denatured and renatured separately by heating to 90° C. for 2 minutes and snap-cooling on ice for 10-15 minutes. The ribozyme and substrate were incubated, separately, at 37° C. for 10 minutes in a buffer containing 50 mM Tris-HCl and 10 mM MgCl₂. The reaction was initiated by mixing the ribozyme and substrate solutions and incubating at 37° C. Aliquots of 5 μl were taken at regular intervals of time and the reaction was quenched by mixing with equal volume of 2× formamide stop mix. The samples were resolved on 20% denaturing polyacrylamide gels. The results were quantified and percentage of target RNA cleaved is plotted as a function of time.

[0245] Referring to FIGS. 11B and 11C, hammerhead ribozymes targeted against sites 1358 and 4229 within the flt-1 RNA are capable of cleaving target RNA efficiently in vitro.

### Example 8

### In Vitro Cleavage of KDR RNA by Hammerhead Ribozymes

[0246] In this non-limiting example, hammerhead ribozymes targeted against sites 726, 527, 3702 and 3950 within KDR RNA were synthesized as described above. RNA cleavage reactions were carried out in vitro essentially as described under Example 7.

[0247] Referring to FIGS. 14 and 15, all four ribozymes were able to cleave their cognate target RNA efficiently in a sequence-specific manner.

### Example 9

### In Vitro Cleavage of RNA by Hammerhead Ribozymes Targeted Against Cleavage Sites that are Homologous Between KDR and flt-1 mRNA

[0248] Given that flt-1 and KDR mRNAs are highly homologous in certain regions, some ribozyme target sites are also homologous (see Table X). In this case, a single ribozyme will target both flt-1 and KDR mRNAs. Hammerhead ribozyme (FLT/KDR-I) targeted against one of the homologous sites between flt-1 and KDR (flt-1 site 3388 and KDR site 3151) was synthesized as described above. Ribozymes with either a 3 bp stem II or a 4 bp stem II were synthesized. RNA cleavage reactions were carried out in vitro essentially as described under Example 7.

[0249] Referring to FIG. 16, FLT/KDR-I ribozyme with either a 3 or a 4 bp stem II was able to cleave its target RNA efficiently in vitro.

### Example 10

### Effect of Multiple Ribozymes Targeted Against Both flt-1 and KDR RNA on Cell Proliferation

[0250] Since both flt-1 and KDR receptors of VEGF are involved in angiogenesis, the inhibition of the expression of both of these genes can be an effective approach to inhibit angiogenesis.

[0251] Human microvascular endothelial cells were treated with hammerhead ribozymes targeted against sites flt-1 4229 alone, KDR 527 alone, KDR 726 alone, KDR 3950 alone, flt-1 4229+KDR 527, flt-1 4229+KDR 726 or flt-1 4229+KDR 3950. As shown in FIG. 17, all the combinations of active ribozymes (A) caused significant inhibition of VEGF-mediated induction of cell proliferation. No significant inhibition of cell proliferation was observed when the cells were treated with a catalytically inactive (I) hammerhead ribozymes. Additionally, cells treated with ribozymes targeted against both flt-1 and KDR RNAs− flt-1 4229+KDR 527; flt-1 4229+KDR 726; flt-1 4229+KDR 3950, were able to cause a greater inhibition of VEGF-mediated induction of cell proliferation when compared with individual ribozymes targeted against either flt-1 or KDR RNA (see flt-1 4229 alone; KDR 527 alone; KDR 726 alone; KDR 3950 alone). This strongly suggests that treatment of cells with multiple ribozymes can be a more effective means of inhibition of gene expression.

### Animal Models

[0252] There are several animal models in which the anti-angiogenesis effect of nucleic acids of the present invention, such as enzymatic nucleic acids, directed against VEGF-R mRNAs can be tested. Typically a corneal model has been used to study angiogenesis in rat and rabbit since recruitment of vessels can easily be followed in this normally avascular tissue (Pandey et al., 1995 Science 268: 567-569). In these models, a small Teflon or Hydron disk pretreated with an angiogenesis factor (e.g. bFGF or VEGF) is inserted into a pocket surgically created in the cornea. Angiogenesis is monitored 3 to 5 days later. Enzymatic nucleic acids directed against VEGF-R mRNAs are delivered in the disk as well, or dropwise to the eye over the time course of the experiment. In another eye model, hypoxia has been shown to cause both increased expression of VEGF and neovascularization in the retina (Pierce et al., 1995 Proc. Natl. Acad. Sci. USA. 92: 905-909; Shweiki et al., 1992 J. Clin. Invest. 91: 2235-2243).

[0253] In human glioblastomas, it has been shown that VEGF is at least partially responsible for tumor angiogenesis (Plate et al., 1992 Nature 359, 845). Animal models have been developed in which glioblastoma cells are implanted subcutaneously into nude mice and the progress of tumor growth and angiogenesism is studied (Kim et al., 1993 supra; Millauer et al., 1994 supra).

[0254] Another animal model that addresses neovascularization involves Matrigel, an extract of basement membrane that becomes a solid gel when injected subcutaneously (Passaniti et al., 1992 Lab. Invest. 67: 519-528). When the Matrigel is supplemented with angiogenesis factors such as VEGF, vessels grow into the Matrigel over a period of 3 to 5 days and angiogenesis can be assessed. Again, nucleic acids directed against VEGF-R mRNAs are delivered in the Matrigel.

[0255] Several animal models exist for screening of anti-angiogenic agents. These include corneal vessel formation following corneal injury (Burger et al., 1985 Cornea 4: 35-41; Lepri, et al., 1994 J. Ocular Pharmacol. 10: 273-280; Ormerod et al., 1990 Am. J. Pathol. 137: 1243-1252) or intracorneal growth factor implant (Grant et al., 1993 Diabetologia 36: 282-291; Pandey et al. 1995 supra; Zieche et al., 1992 Lab. Invest. 67: 711-715), vessel growth into Matrigel matrix containing growth factors (Passaniti et al., 1992 supra), female reproductive organ neovascularization following hormonal manipulation (Shweiki et al., 1993 Clin. Invest. 91: 2235-2243), several models involving inhibition of tumor growth in highly vascularized solid tumors (O'Reilly et al., 1994 Cell 79: 315-328; Senger et al., 1993 Cancer and Metas. Rev. 12: 303-324; Takahasi et al., 1994 Cancer Res. 54: 4233-4237; Kim et al., 1993 supra), and transient hypoxia-induced neovascularization in the mouse retina (Pierce et al., 1995 Proc. Natl. Acad. Sci. USA. 92: 905-909).

[0256] The cornea model, described in Pandey et al. supra, is the most common and well characterized anti-angiogenic agent efficacy screening model. This model involves an avascular tissue into which vessels are recruited by a stimulating agent (growth factor, thermal or alkali burn, endotoxin). The corneal model utilizes the intrastromal corneal implantation of a Teflon pellet soaked in a VEGF-Hydron solution to recruit blood vessels toward the pellet which can be quantitated using standard microscopic and image analysis techniques. To evaluate their anti-angiogenic efficacy, nucleic acids are applied topically to the eye or bound within Hydron on the Teflon pellet itself. This avascular cornea as well as the Matrigel (see below) provide for low background assays. While the corneal model has been performed extensively in the rabbit, studies in the rat have also been conducted.

[0257] The mouse model (Passaniti et al., supra) is a non-tissue model which utilizes Matrigel, an extract of basement membrane (Kleinman et al., 1986) or Millipore® filter disk, which can be impregnated with growth factors and anti-angiogenic agents in a liquid form prior to injection. Upon subcutaneous administration at body temperature, the Matrigel or Millipore® filter disk forms a solid implant. VEGF embedded in the Matrigel or Millipore® filter disk is used to recruit vessels within the matrix of the Matrigel or Millipore® filter disk which can be processed histologically for endothelial cell specific vWF (factor VIII antigen) immunohistochemistry, Trichrome-Masson stain, or hemoglobin content. Like the cornea, the Matrigel or Millipore® filter disk are avascular; however, it is not tissue. In the Matrigel or Millipore® filter disk model, nucleic acids are administered within the matrix of the Matrigel or Millipore® filter disk to test their anti-angiogenic efficacy. Thus, delivery issues in this model, as with delivery of nucleic acids by Hydron-coated Teflon pellets in the rat cornea model, may be less problematic due to the homogeneous presence of the nucleic acid within the respective matrix.

[0258] These models offer a distinct advantage over several other angiogenic models listed previously. The ability to use VEGF as a pro-angiogenic stimulus in both models is highly desirable since the instant nucleic acid molecules target only VEGFr mRNA. In other words, the involvement of other non-specific types of stimuli in the cornea and Matrigel models is not advantageous from the standpoint of understanding the pharmacologic mechanism by which the anti-VEGFr mRNA nucleic acid molecules produce their effects. In addition, the models allow for testing the specificity of the anti-VEGFr mRNA nucleic acids by using either a- or bFGF as a pro-angiogenic factor. Vessel recruitment using FGF should not be affected in either model by anti-VEGFr mRNA nucleic acid molecules. Other models of angiogenesis including vessel formation in the female reproductive system using hormonal manipulation (Shweiki et al., 1993 supra); a variety of vascular solid tumor models which involve indirect correlations with angiogenesis (O'Reilly et al., 1994 supra; Senger et al., 1993 supra; Takahasi et al., 1994 supra; Kim et al., 1993 supra); and retinal neovascularization following transient hypoxia (Pierce et al., 1995 supra) were not selected for efficacy screening due to their non-specific nature, although there is a correlation between VEGF and angiogenesis in these models.

[0259] Other model systems to study tumor angiogenesis is reviewed by Folkman, 1985 Adv. Cancer. Res. 43, 175.

### Use of Murine Models

[0260] For a typical systemic study involving 10 mice (20 g each) per dose group, 5 doses (1, 3, 10, 30 and 100 mg/kg daily over 14 days continuous administration), approximately 400 mg of enzymatic nucleic acid, formulated in saline is used. A similar study in young adult rats (200 g) requires over 4 g. Parallel pharmacokinetic studies involve the use of similar quantities of enzymatic nucleic acid further justifying the use of murine models.

### Enzymatic Nucleic Acids and Lewis Lung Carcinoma and B-16 Melanoma Murine Models

[0261] Identifying a common animal model for systemic efficacy testing of enzymatic nucleic acid is an efficient way of screening enzymatic nucleic acid for systemic efficacy.

[0262] The Lewis lung carcinoma and B-16 murine melanoma models are well accepted models of primary and metastatic cancer and are used for initial screening of anti-cancer agents. These murine models are not dependent upon the use of immunodeficient mice, are relatively inexpensive, and minimize housing concerns. Both the Lewis lung and B-16 melanoma models involve subcutaneous implantation of approximately 10⁶ tumor cells from metastatically aggressive tumor cell lines (Lewis lung lines 3LL or D122, LLc-LN7; B-16-BL6 melanoma) in C57BL/6J mice. Alternatively, the Lewis lung model can be produced by the surgical implantation of tumor spheres (approximately 0.8 mm in diameter). Metastasis also can be modeled by injecting the tumor cells directly intravenously. In the Lewis lung model, microscopic metastases can be observed approximately 14 days following implantation with quantifiable macroscopic metastatic tumors developing within 21-25 days. The B-16 melanoma exhibits a similar time course with tumor neovascularization beginning 4 days following implantation. Since both primary and metastatic tumors exist in these models after 21-25 days in the same animal, multiple measurements can be taken as indices of efficacy. Primary tumor volume and growth latency as well as the number of micro- and macroscopic metastatic lung foci or number of animals exhibiting metastases can be quantitated. The percent increase in lifespan can also be measured. Thus, these models provide suitable primary efficacy assays for screening systemically administered enzymatic nucleic acids and enzymatic nucleic acid formulations.

[0263] In the Lewis lung and B-16 melanoma models, systemic pharmacotherapy with a wide variety of agents usually begins 1-7 days following tumor implantation/inoculation with either continuous or multiple administration regimens. Concurrent pharmacokinetic studies can be performed to determine whether sufficient tissue levels of ribozymes can be achieved for pharmacodynamic effect to be expected. Furthermore, primary tumors and secondary lung metastases can be removed and subjected to a variety of in vitro studies (i.e. target RNA reduction).

[0264] Flt-1, KDR and/or flk-1 protein levels can be measured clinically or experimentally by FACS analysis. Flt-1, KDR and/or flk-1 encoded mRNA levels are assessed by Northern analysis, RNase-protection, primer extension analysis and/or quantitative RT-PCR. Nucleic acids that block flt-1, KDR and/or flk-1 protein encoding mRNAs and therefore result in decreased levels of flt-1, KDR and/or flk-1 activity by more than 20% in vitro can be identified.

[0265] Nucleic acids and/or genes encoding them are delivered by either free delivery, liposome delivery, cationic lipid delivery, adeno-associated virus vector delivery, adenovirus vector delivery, retrovirus vector delivery or plasmid vector delivery in these animal model experiments (see above).

[0266] Subjects can be treated by locally administering nucleic acids targeted against VEGF-R by direct injection. Routes of administration include, but are not limited to, intravascular, intramuscular, subcutaneous, intraarticular, aerosol inhalation, oral (tablet, capsule or pill form), topical, systemic, ocular, intraperitoneal and/or intrathecal delivery.

### Example 11

### Ribozyme-Mediated Inhibition of Angiogenesis In Vivo

[0267] The purpose of this study was to assess the anti-angiogenic activity of hammerhead ribozymes targeted against flt-1 4229 site in the rat cornea model of VEGF induced angiogenesis (see above). These ribozymes have either active or inactive catalytic core and either bind and cleave or just bind to VEGF-R mRNA of the flt-1 subtype. The active ribozymes, that are able to bind and cleave the target RNA, have been shown to inhibit (¹²⁵I-labeled) VEGF binding in cultured endothelial cells and produce a dose-dependent decrease in VEGF induced endothelial cell proliferation in these cells (see Examples 3-5 above). The catalytically inactive forms of these ribozymes, wherein the ribozymes can only bind to the RNA but cannot catalyze RNA cleavage, fail to show these characteristics. The ribozymes and VEGF were co-delivered using the filter disk method: Nitrocellulose filter disks (Millipore®) of 0.057 diameter were immersed in appropriate solutions and were surgically implanted in rat cornea as described by Pandey et al., supra. This delivery method has been shown to deliver rhodamine-labeled free ribozyme to scleral cells and, in all likelihood cells of the pericorneal vascular plexus. Since the active ribozymes show cell culture efficacy and can be delivered to the target site using the disk method, it is essential that these ribozymes be assessed for in vivo anti-angiogenic activity.

The stimulus for angiogenesis in this study was the treatment of the filter disk with 30 μM VEGF which is implanted within the cornea's stroma. This dose yields reproducible neovascularization stemming from the pericorneal vascular plexus growing toward the disk in a dose-response study 5 days following implant. Filter disks treated only with the vehicle for VEGF show no angiogenic response. The ribozymes were co-adminstered with VEGF on a disk in two different ribozyme concentrations. One concern with the simultaneous administration is that the ribozymes will not be able to inhibit angiogenesis since VEGF receptors can be stimulated. However, Applicant has observed that in low VEGF doses, the neovascular response reverts to normal suggesting that the VEGF stimulus is essential for maintaining the angiogenic response. Blocking the production of VEGF receptors using simultaneous administration of anti-VEGF-R mRNA ribozymes could attenuate the normal neovascularization induced by the filter disk treated with VEGF.

### Materials and Methods:

### 1. Stock Hammerhead Ribozyme Solutions:

[0268] a. flt-1 4229 (786 μM)-Active
[0269] b. flt-1 4229 (736 μM)-Inactive

### 2. Experimental Solutions/Groups:

[0270] Group 1 Solution 1 Control VEGF solution: 30 μM in 82 mM Tris base
Group 2 Solution 2 flt-1 4229 (1 μg/μL) in 30 μM VEGF/82 mM Tris base
Group 3 Solution 3 flt-1 4229 (10 μg/μL) in 30 μM VEGF/82 mM Tris base
Group 4 Solution 4 No VEGF, flt-1 4229 (10 μg/μL) in 82 mM Tris base
Group 5 Solution 5 No VEGF, No ribozyme in 82 mM Tris base
10 eyes per group, 5 animals (Since they have similar molecular weights, the molar concentrations should be essentially similar).
Each solution (VEGF and RIBOZYMES) were prepared as a 2× solution for 1:1 mixing for final concentrations above, with the exception of solution 1 in which VEGF was 2× and diluted with ribozyme diluent (sterile water).

### 3. VEGF Solutions

[0271] The 2× VEGF solution (60 μM) was prepared from a stock of 0.82 μg/mL in 50 mM Tris base. 200 μL of VEGF stock was concentrated by speed vac to a final volume of 60.8 μL, for a final concentration of 2.7 μg/μL or 60 μM. Six 10 μL aliquots were prepared for daily mixing. 2× solutions for VEGF and Ribozyme was stored at 4° C. until the day of the surgery. Solutions were mixed for each day of surgery. Original 2× solutions were prepared on the day before the first day of the surgery.

### 4. Surgical Solutions:

### Anesthesia:

[0272] stock ketamine hydrochloride 100 mg/mL
[0273] stock xylazine hydrochloride 20 mg/mL
[0274] stock acepromazine 10 mg/mL

[0275] Final anesthesia solution: 50 mg/mL ketamine, 10 mg/mL xylazine, and 0.5 mg/mL acepromazine
[0276] 5% povidone iodine for ophthalmic surgical wash
[0277] 2% lidocaine (sterile) for ophthalmic administration (2 drops per eye)
[0278] sterile 0.9% NaCl for ophthalmic irrigation

### 5. Surgical Methods:

[0279] Standard surgical procedure was performed as described in Pandey et al., supra. Filter disks were incubated in 1 μL of each solution for approximately 30 minutes prior to implantation.

### 6. Experimental Protocol:

[0280] The animal corneas were treated with the treatment groups as described above. Animals were allowed to recover for 5 days after treatment with daily observation (scoring 0-3). On the fifth day animals were euthanized and digital images of each eye was obtained for quantitaion using Image Pro Plus. Quantitated neovascular surface areas were analyzed by ANOVA followed by two post-hoc tests including Dunnets and Tukey-Kramer tests for significance at the 95% confidence level. Dunnets provide information on the significance between the differences within the means of treatments vs. controls while Tukey-Kramer provide information on the significance of differences within the means of each group.

[0281] Results are graphically represented in FIG. 18. As shown in FIG. 18, flt-1 4229 active hammerhead ribozyme at both concentrations was effective at inhibiting angiogenesis, while the inactive ribozyme did not show any significant reduction in angiogenesis. A statistically significant reduction in neovascular surface area was observed only with active ribozymes. This result clearly shows that the ribozymes are capable of significantly inhibiting angiogenesis in vivo. Specifically, the mechanism of inhibition appears to be by the binding and cleavage of target RNA by ribozymes.

### Example 12

### Bioactivity of Anti-Angiogenesis Ribozymes Targeting flt-1 and kdr RNA

[0282] Materials and Methods

[0283] Ribozymes: Hammerhead ribozymes and controls designed to have attenuated activity (attenuated controls) were synthesized and purified as previously described above. The attenuated ribozyme controls maintain the binding arm sequence of the parent ribozyme and thus are still capable of binding to the mRNA target. However, they have two nucleotide changes in the core sequence that substantially reduce their ability to carry out the cleavage reaction. Ribozymes were designed to target Flt-1 or KDR mRNA sites conserved in human, mouse, and rat. In general, ribozymes with binding arms of seven nucleotides were designed and tested. If, however, only six nucleotides surrounding the cleavage site were conserved in all three species, six nucleotide binding arms were used. A subset of ribozyme and attenuated control sequences and modifications are listed in Table XII. Data are presented herein for 2′-NH₂ uridine modified ribozymes in cell proliferation studies and for 2′-C-allyl uridine modified ribozymes in RNAse protection, in vitro cleavage and corneal studies.

[0284] In vitro ribozyme cleavage assays: In vitro RNA cleavage rates on a 15 nucleotide synthetic RNA substrate were measured as previously described above.

[0285] Cell culture: Human dermal microvascular endothelial cells (HMVEC-d, Clonetics Corp.) were maintained at 37° C. in flasks or plates coated with 1.5% porcine skin gelatin (300 bloom, Sigma) in Growth medium (Clonetics Corp.) supplemented with 10-20% fetal bovine serum (FBS, Hyclone). Cells were grown to confluency and used up to the seventh passage. Stimulation medium consisted of 50% Sigma 99 media and 50% RPMI 1640 with L-glutamine and additional supplementation with 10 μg/mL Insulin-Transferrin-Selenium (Gibco BRL) and 10% FBS. Cell growth was stimulated by incubation in Stimulation medium supplemented with 20 ng/mL of either VEGF₁₆₅ or bFGF. VEGF₁₆₅ (165 amino acids) was selected for cell culture and animal studies because it is the predominant form of the four native forms of VEGF generated by alternative mRNA splicing. Cell culture assays were carried out in triplicate.

[0286] Ribozyme and Ribozyme/LIPOFECTAMINE™ Formulations:

[0287] Cell culture: Ribozymes or attenuated controls (50-200 nM) were formulated for cell culture studies and used immediately. Formulations were carried out with LIPOFECTAMINE™ (Gibco BRL) at a 3:1 lipid to phosphate charge ratio in serum-free medium (OPTI-MEM™, Gibco BRL) by mixing for 20 minutes at room temperature. For example, a 3:1 lipid to phosphate charge ratio was established by complexing 200 nM ribozyme with 10.8 μg/μL LIPOFECTAMINE™ (13.5 μM DOSPA).

[0288] In vivo: For corneal studies, lyophilized ribozyme or attenuated controls were resuspended in sterile water at a final stock concentration of 170 μg/μL (highest dose). Lower doses (1.7-50 μg/μL) were prepared by serial dilution in sterile water.

[0289] Proliferation assay: HMVEC-d were seeded (5×10³ cells/well) in 48-well plates (Costar) and incubated 24-30 hours in Growth medium at 37° C. After removal of the Growth medium, cells were treated with 50-200 nM LIPOFECTAMINE™ complexes of ribozyme or attenuated controls for 2 hours in OPTI-MEM™. The ribozyme/control-containing medium was removed and the cells were washed extensively in 1×PBS. The medium was then replaced with Stimulation medium or Stimulation medium supplemented with 20 ng/mL VEGF₁₆₅ or bFGF. After 48 hours, the cell number was determined using a Coulter™ cell counter. Data are presented as cell number per well following 48 h of VEGF stimulation.

[0290] RNAse protection assay: HMVEC-d were seeded (2×10⁵ cells/well) in 6-well plates (Costar) and allowed to grow 32-36 hours in Growth medium at 37° C. Cells were treated with LIPOFECTAMINE™ complexes containing 200 nM ribozyme or attenuated control for 2 hours as described under “Proliferation Assay” and then incubated in Growth medium containing 20 ng/mL VEGF₁₆₅ for 24 hours. Cells were harvested and an RNAse protection assay was carried out using the Ambion Direct Protect kit and protocol with the exception that 50 mM EDTA was added to the lysis buffer to eliminate the possibility of ribozyme cleavage during sample preparation. Antisense RNA probes targeting portions of Flt-1 and KDR were prepared by transcription in the presence of [³²P]-UTP. Samples were analyzed on polyacrylamide gels and the level of protected RNA fragments was quantified using a Molecular Dynamics PhosphorImager. The levels of Flt-1 and KDR were normalized to the level of cyclophilin (human cyclophilin probe template, Ambion) in each sample. The coefficient of variation for cyclophilin levels was 11% [265940 cpm±29386 (SD)] for all conditions tested here (i.e. in the presence of either active ribozymes or attenuated controls). Thus, cyclophilin is useful as an internal standard in these studies.

[0291] Rat Corneal Pocket Assay of VEGF-Induced Angiogenesis:

[0292] Animal guidelines and anesthesia. Animal housing and experimentation adhered to standards outlined in the 1996 Guide for the Care and Use of Laboratory Animals (National Research Council). Male Sprague Dawley rats (250-300 g) were anesthetized with ketamine (50 mg/kg), xylazine (10 mg/kg), and acepromazine (0.5 mg/kg) administered intramuscularly (im). The level of anesthesia was monitored every 2-3 min by applying hind limb paw pressure and examining for limb withdrawal. Atropine (0.4 mg/kg, im) was also administered to prevent potential corneal reflex-induced bradycardia.

[0293] Preparation of VEGF soaked disk. For corneal implantation, 0.57 mm diameter nitrocellulose disks, prepared from 0.45 μm pore diameter nitrocellulose filter membranes (Millipore Corporation), were soaked for 30 min in 1 μL of 30 μM VEGF₁₆₅ in 82 mM Tris HCl (pH 6.9) in covered petri dishes on ice.

[0294] Corneal surgery. The rat corneal model used in this study was a modified from Koch et al. Supra and Pandey et al., supra. Briefly, corneas were irrigated with 0.5% povidone iodine solution followed by normal saline and two drops of 2% lidocaine. Under a dissecting microscope (Leica MZ-6), a stromal pocket was created and a presoaked filter disk (see above) was inserted into the pocket such that its edge was 1 mm from the corneal limbus.

[0295] Intraconjunctival injection of test solutions. Immediately after disk insertion, the tip of a 40-50 μm OD injector (constructed in our laboratory) was inserted within the conjunctival tissue 1 mm away from the edge of the corneal limbus that was directly adjacent to the VEGF-soaked filter disk. Six hundred nanoliters of test solution (ribozyme, attenuated control or sterile water vehicle) were dispensed at a rate of 1.2 μL/min using a syringe pump (Kd Scientific). The injector was then removed, serially rinsed in 70% ethanol and sterile water and immersed in sterile water between each injection. Once the test solution was injected, closure of the eyelid was maintained using microaneurism clips until the animal began to recover gross motor activity. Following treatment, animals were warmed on a heating pad at 37° C.

[0296] Animal treatment groups/experimental protocol. Ribozymes targeting Flt-1 site 4229 and KDR mRNA site 726 were tested in the corneal model along with their attenuated controls. Five treatment groups were assigned to examine the effects of five doses of each test substance over a dose range of 1-100 μg on VEGF-stimulated angiogenesis. Negative (30 μM VEGF soaked filter disk and intraconjunctival injection of 600 nL sterile water) and no stimulus (Tris-soaked filter disk and intraconjunctival injection of sterile water) control groups were also included. Each group consisted of five animals (10 eyes) receiving the same treatment.

[0297] Quantitation of angiogenic response. Five days after disk implantation, animals were euthanized following im administration of 0.4 mg/kg atropine and corneas were digitally imaged. The neovascular surface area (NSA, expressed in pixels) was measured postmortem from blood-filled corneal vessels using computerized morphometry (Image Pro Plus, Media Cybernetics, v2.0). The individual mean NSA was determined in triplicate from three regions of identical size in the area of maximal neovascularization between the filter disk and the limbus. The number of pixels corresponding to the blood-filled corneal vessels in these regions was summated to produce an index of NSA. A group mean NSA was then calculated. Data from each treatment group were normalized to VEGF/ribozyme vehicle-treated control NSA and finally expressed as percent inhibition of VEGF-induced angiogenesis.

[0298] Statistics. After determining the normality of treatment group means, group mean percent inhibition of VEGF-induced angiogenesis was subjected to a one-way analysis of variance. This was followed by two post-hoc tests for significance including Dunnett's (comparison to VEGF control) and Tukey-Kramer (all other group mean comparisons) at alpha=0.05. Statistical analyses were performed using JMP v.3.1.6 (SAS Institute).

[0299] Results

[0300] Ribozyme-mediated reduction of VEGF-induced cell proliferation: Ribozyme cleavage of Flt-1 or KDR mRNA should result in a decrease in the density of cell surface VEGF receptors. This decrease should limit VEGF binding and consequently interfere with the mitogenic signaling induced by VEGF. To determine if cell proliferation was impacted by anti-Flt-1 and/or anti-KDR ribozyme treatment, proliferation assays using cultured human microvascular cells were carried out. Ribozymes included in the proliferation assays were initially chosen by their ability to decrease the level of VEGF binding to treated cells (see FIG. 8). In these initial studies, ribozymes targeting 20 sites in the coding region of each mRNA were screened. The most effective ribozymes against two sites in each target (Table XII), Flt-1 sites 1358 and 4229 and KDR sites 726 and 3950, were included in the proliferation assays reported here (FIG. 19). In addition, attenuated analogs of each ribozyme were used as controls (Table XII). These attenuated controls are still capable of binding to the mRNA target since the binding arm sequence is maintained. However, these controls have two nucleotide changes in the core sequence that substantially reduce their ability to carry out the cleavage reaction.

[0301] The antiproliferative effect of active ribozymes targeting two lead sites on each VEGF receptor mRNA is shown in FIG. 19. The active ribozymes tested decreased the relative proliferation of HMVEC-d after VEGF stimulation, an effect that increased with ribozyme concentration. This concentration dependency was not observed following treatment with the attenuated controls designed for these sites. In fact, little or no change in cell growth was noted following treatment with the attenuated controls, even though these controls can still bind to the specific target sequences. At 200 nM, there was a distinct “window” between the anti-proliferative effects of each ribozyme and its attenuated control; a trend also observed at lower doses. This window of inhibition of proliferation (56-77% based on total cells/well) reflects the contribution of ribozyme-mediated activity. In comparison, no effect of anti-Flt-1 or anti-KDR ribozymes was noted on bFGF-stimulated cell proliferation (FIG. 19C, 19F). Moreover, an irrelevant, but active, ribozyme whose binding sequence is not found in either Flt-1 or KDR mRNA had no effect in this assay (FIG. 19B). These data are consistent with the basic ribozyme mechanism in which binding and cleavage are necessary components. Although the relative surface distribution of Flt-1 and KDR receptors in this cell type is not known, the antiproliferative effects of these ribozymes indicate that, at least in cell culture, both receptors are functionally coupled to proliferation.

[0302] Specific reduction of Flt-1 or KDR mRNA by ribozyme treatment: To confirm that anti-Flt-1 and anti-KDR ribozymes reduce their respective mRNA targets, cellular levels of Flt-1 or KDR were quantified using an RNAse protection assay with specific Flt-1 or KDR probes. For each target, one ribozyme/attenuated control pair was chosen for continued study. Data from a representative experiment are shown in FIG. 20. Exposure of HMVEC-d to active ribozyme targeting Flt-1 site 4229 decreased Flt-1 mRNA, but not KDR mRNA. Likewise, treatment with the active ribozyme targeting KDR site 726 decreased KDR, but not Flt-1 mRNA. Both ribozymes decreased the level of their respective target RNA by greater than 50%. The degree of reduction associated with the corresponding attenuated controls was not greater than 13%.

[0303] In Vitro Activity of Anti-Flt and Anti-KDR Ribozymes.

[0304] To confirm further the necessity of an active ribozyme core, in vitro cleavage activities were determined for the Flt-1 site 4229 ribozyme and the KDR site 726 ribozyme as well as their paired attenuated controls. The first order rate constants calculated from the time-course of short substrate cleavage for the anti-Flt-1 ribozyme and its attenuated control were 0.081±0.0007 min⁻¹ and 0.001±6×10⁻⁵ min⁻¹, respectively. For the anti-KDR ribozyme and its paired control, the first order rate constants were 0.434±0.024 min⁻¹ and 0.002±1×10⁻⁴ min⁻¹, respectively. Although the attenuated controls retain a very slight level of cleavage activity under these optimized conditions, the decrease in in vitro cleavage activity between each active ribozyme and its paired attenuated control is about two orders of magnitude. Thus, an active core is essential for cleavage activity in vitro and is also necessary for ribozyme activity in cell culture.

[0305] Ribozyme-mediated reduction of VEGF-induced angiogenesis in vivo. To assess whether ribozymes targeting VEGF receptor mRNA could impact the complex process of angiogenesis, prototypic anti-Flt-1 and KDR ribozymes that were identified in cell culture studies were screened in a rat corneal pocket assay of VEGF-induced angiogenesis. In this assay, corneas implanted with VEGF-containing filter disks exhibited a robust neovascular response in the corneal region between the disk and the corneal limbus (from which the new vessels emerge). Disks containing a vehicle solution elicited no angiogenic response. In separate studies, intraconjunctival injections of sterile water vehicle did not affect the magnitude of the VEGF-induced angiogenic response. In addition, ribozyme injections alone did not induce angiogenesis.

[0306] The dose-related effects of anti-Flt-1 or KDR ribozymes on the VEGF-induced angiogenic response were then examined. FIGS. 21 and 22 illustrate the quantified antiangiogenic effect of the anti-Flt-1 (site 4229) and KDR (site 726) ribozymes and their attenuated controls over a dose range from 1 to 100 μg, respectively. For both ribozymes, the maximal antiangiogenic response (48 and 36% for anti-Flt-1 and KDR ribozymes, respectively) was observed at a dose of 10 μg.

[0307] The anti-Flt-1 ribozyme produced a significantly greater antiangiogenic response than its attenuated control at 3 and 10 μg (p<0.05; FIG. 21). Its attenuated control exhibited a small but significant antiangiogenic response at doses above 10 μg compared to vehicle treated VEGF controls (p<0.05; FIG. 21). At its maximum, this response was not significantly greater than that observed with the lowest dose of active anti-Flt-1 ribozyme. The anti-KDR ribozyme significantly inhibited angiogenesis from 3 to 30 μg (p<0.05; FIG. 22). The anti-KDR attenuated control had no significant effect at any dose tested.

### Example 13

### In Vivo Inhibition of Tumor Growth and Metastases by VEGF-R Ribozymes

[0308] A. Lewis Lung Carcinoma Mouse Model: Ribozymes were chemically synthesized as described above. The sequence of ANGIOZYME™ bound to its target RNA is shown in FIG. 26.

[0309] The tumors in this study were derived from a cell line (LLC-HM) which gives rise to reproducible numbers of spontaneous lung metastases when propagated in vivo. The LLC-HM line was obtained from Dr. Michael O'Reilly, Harvard University. Tumor neovascularization in Lewis lung carcinoma has been shown to be VEGF-dependent. Tumors from mice bearing LLC-HM (selected for the highly metastatic phenotype by serial propagation) were harvested 20 days post-inoculation. A tumor brei suspension was prepared from these tumors according to standard protocols. On day 0 of the study, 0.5×10⁶ viable LLC-HM tumor cells were injected subcutaneously (sc) into the dorsum or flank of previously untreated mice (100 μL injectate). Tumors were allowed to grow for a period of 3 days prior to initiating continuous intravenous administration of saline or 30 mg/kg/d ANGIOZYME™ via Alzet mini-pumps. One set of animals was dosed from days 3 to 17, inclusive. Tumor length and width measurements and volumes were calculated according to the formula: Volume=0.5(length)(width)². At post-inoculation day 25, animals were euthanized and lungs harvested. The number of lung macrometastatic nodules was counted. It should be noted that metastatic foci were quantified 8 days after the cessation of dosing. Ribozyme solutions were prepared to deliver to another set of animals 100, 10, 3, or 1 mg/kg/day of ANGIOZYME™ via Alzet mini-pumps. A total of 10 animals per dose or saline control group were surgically implanted on the left flank with osmotic mini-pumps pre-filled with the respective test solution three days following tumor inoculation. Pumps were attached to indwelling jugular vein catheters.

[0310] FIG. 27 shows the antitumor effects of ANGIOZYME™. There is a statistically significant inhibition (p<0.05) of primary LLC-HM tumor growth in tumors grown in the flank regions compared to saline control. ANGIOZYME™ significantly reduced (p<0.05) the number of lung metastatic foci in animals inoculated either in the flank regions. FIG. 28 illustrates the dose-dependent anti-metastatic effect of ANGIOZYME™ compared to saline control.

[0311] B. Mouse Colorectal Cancer Model. KM12L4a-16 is a human colorectal cancer cell line. On day 0 of the study, 0.5×10⁶ KM12L4a-16 cells were implanted into the spleen of nude mice. Three days after tumor inoculation, Alzet minipumps were implanted and continuous subcutaneous delivery of either saline or 12, 36 or 100 mg/kg/day of ANGIOZYME™ was initiated. On day 5, the spleens containing the primary tumors were removed. On day 18, the Alzet minipumps were replaced with fresh pumps so that delivery of saline or ANGIOZYME™ was continuous over a 28 day period from day 3 to day 32. Animals were euthanized on day 41 and the liver tumor burden was evaluated.

[0312] Following treatment with 100 mg/kg/day of ANGIOZYME™, there was a significant reduction in the incidence and median number of liver metastasis (FIGS. 29 and 30). In saline-treated animals, the median number of metastases was ≧101. However, at the high dose of ANGIOZYME™ (100 mg/kg/day), the median number of metastases was zero.

### Example 14

### Effect of ANGIOZYME™ Alone or in Combination with Chemotherapeutic Agents in the Mouse Lewis Lung Carcinoma Model

[0313] Methods

[0314] Tumor inoculations. Male C57/BL6 mice, age 6 to 8 weeks, were inoculated subcutaneously in the flank with 5×10⁵ LLC-HM cells from brei preparations made from tumors grown in mice.

[0315] Ribozymes and controls. The ribozyme and controls tested in this study are given in Table XIII. RPI.4610, also known as ANGIOZYME™, is an anti-Flt-1 ribozyme that targets site 4229 in the human Flt-1 receptor mRNA (EMBL accession no. X51602). The controls tested include RPI.13141, an attenuated version of RPI.4610 in which four nucleotides in the catalytic core are changed so that the cleavage activity is dramatically decreased. RPI.13141, however, maintains the base composition and binding arms of RPI.4610 and so is still capable of binding to the target site. The second control (RPI.13030) also has changes to the catalytic core (three) to inhibit cleavage activity, but in addition the sequence of the binding arms has been scrambled so that it can no longer bind to the target sequence. One nucleotide in the arm of RPI.13030 is also changed to maintain the same base composition as RPI.4610.

[0316] Ribozyme administrations. Ribozymes and controls were resuspended in normal saline. Administration was initiated seven days following tumor inoculation. Animals either received a daily subcutaneous injection (30 mg/kg test substance) from day 7 to day 20 or were instrumented with an Alzet osmotic minipump (12 μL/day flow rate) containing a solution of ribozyme or control. Subcutaneous infusion pumps delivered the test substances (30 mg/kg/day) from day 7 to 20 (14-day pumps, 420 mg/kg total test substance) or days 7-34 (28-day pumps, 840 mg/kg total test substance). Where indicated, chemotherapeutic agents were given in combination with ribozyme treatment. Cyclophosphamide was given by ip administration on days 7, 9 and 11 (125 mg/kg). Gemcitabine was given by intraperitoneal administration on days 8, 11 and 14 (125 mg/kg). Untreated, uninstrumented animals were used as comparison. Five animals were included in each group.

### Results

[0317] The antiangiogenic ribozyme, ANGIOZYME™, was tested in a model of Lewis lung carcinoma alone and in combination with two chemotherapeutic agents. Previously (see above), 30 mg/kg/day ANGIOZYME™ alone was determined to inhibit both primary tumor growth and lung metastases in a highly metastatic variant of Lewis lung (continuous 14-day intraveneous delivery via Alzet minipump).

[0318] In this study, 30 mg/kg/day ANGIOZYME™ delivered either as a daily subcutaneous bolus injection or as a continuous infusion from an Alzet minipump resulted in a delay in tumor growth (FIG. 23). On average, tumor growth to 500 mm³ was delayed by approximately 7 days in animals being treated with ANGIOZYME™ compared to an untreated group. Growth of tumors in animals being treated with either of two attenuated controls was delayed by only approximately 2 days.

[0319] ANGIOZYME™ delivered by subcutaneous bolus was also tested in combination with either Gemcytabine or cyclophosphamide (FIG. 24). Tumor growth delay increased by about 3 days in the presence of combination therapy with ANGIOZYME™ and Gemcytabine over the effects of either treatment alone. The combination of ANGIOZYME™ and cyclophosphamide did not increase tumor growth delay over that of cyclophosphamide alone, however, suboptimal doses of cyclophosphamide were not included in this study. Neither of the attenuated controls increased the effect of the chemotherapeutic agents.

[0320] The effect of ANGIOZYME™ on metastases to the lung was also determined in the presence and absence of additional chemotherapeutic treatment. Macrometastases to the lungs were counted in two animals in each treatment group on day 20. Data for the daily subcutaneous administration of 30 mg/kg ANGIOZYME™ alone or with Gemcytabine or cyclophosphamide is given in FIG. 25. In the presence of ANGIOZYME™, with or without a chemotherapeutic agent, the lung metastases were reduced to zero. Treatment with either Gemcytabine or cyclophosphamide alone (mean number of metastases 4.5 and 4, respectively) were not as effective as ANGIOZYME™ alone or when used in combination with ANGIOZYME™. Neither of the attenuated controls increased the effect of the chemotherapeutic agents.

[0321] The effect on metastases to the lung was also determined following continuous treatment with ANGIOZYME™. At day 20, an average of approximately 8 macrometastases were noted in the treatment groups which had been instrumented with Alzet minipumps (either 14- or 28-day pumps). This is a decrease in metastases of approximately 50% from the untreated group. Since ANGIOZYME™ delivered by a daily subcutaneous bolus resulted in zero metastases (FIG. 4) in the two animals counted, it is possible that the additional burden of being instrumented with the minipump contributes to a slightly decreased response to ANGIOZYME™.

### Example 15

### Phase I/II Study of Repetitive Dose ANGIOZYME™ Targeting the FLT-1 Receptor of VEGF

[0322] A ribozyme therapeutic agent ANGIOZYME™, was assessed by daily subcutaneous administration in a phase I/II trial for 31 subjects with refractory solid tumors. Demographic information relating to subjects enrolled in the study are shown in Table XX. The primary study endpoint was to determine the safety and maximum tolerated dose of ANGIOZYME™. Secondary endpoints assessed ANGIOZYME™ pharmacokinetics and clinical response. Subjects were treated in four cohorts of three subjects at doses of 10, 30, 100, and 300 mg/m²/day. Following the dose escalation phase, an additional 15 evaluable subjects were entered in an expanded cohort at 100 mg/m2/day. Subjects were dosed for a minimum of 29 consecutive days with 24-hour pharmacokinetic analyses on Day 1 and 29. Clinical response was assessed monthly.

[0323] Results The data from 20 subjects indicated that ANGIOZYME™ was well tolerated, with no systemic adverse events. FIG. 31 shows the plasma concentration profile of ANGIOZYME™ after a single SC (sub-cutaneous) dose of 10, 30, 100, or 300 mg/m². The pharmacokinetic parameters of ANGIOZYME™ after SC bolus administration are outlined in Table XXI. An MTD (maximum tolerated dose) could not be established. One subject in the 300 mg/m²/d group experienced a grade 3 injection site reaction. Subjects in the other groups experienced intermittent grade 1 and grade 2 injection site reactions with erythema and induration. No systemic or laboratory toxicities were observed. Pharmacokinetic analyses demonstrated dose-dependent plasma concentrations with good bioavailability (70-90%), t1/2=209-384 min, and no accumulation after repeated doses. To date, 17/28 (61%) of evaluable subjects have had stable disease for periods of one to six months and two subjects (nasopharyngeal squamous cell carcinoma and melanoma) had minor clinical responses. The subject with nasopharyngeal carcinoma demonstrated central tumor necrosis as indicated by MRI. The longest period of treatment thus far has been 8 months for two subjects at 100 mg/m²/d (breast, peritoneal mesothelioma).

### Example 16

### In Vivo Inhibition of Neovascularization in an Ocular Animal Model by VEGF-R Ribozymes

[0324] Summary of the Mouse Model: A mouse model of proliferative retinopathy (Aiello et al., 1995, Proc. Natl. Acad. Sci. USA 92: 10457-10461; Robinson et al., 1996, Proc. Natl. Acad. Sci. USA 93: 4851-4856; Pierce et al., 1996, Archives of Opthalmology 114: 1219-1228) in which neovascularization of the mouse retina is induced by exposure of 7-day old mice to 75% oxygen followed by a return to normal room air. The initial period in high oxygen causes an obliteration of developing blood vessels in the retina. Exposure to room air five days later is perceived as hypoxia by the now underperfused retina. The result is an immediate upregulation of VEGF mRNA and VEGF protein (between 6-12 hours) followed by an extensive retinal neovascularization that peaks in approximately 5 days. Although this model is more representative of retinopathy of prematurity than diabetic retinopathy, it is an accepted small animal model in which to study neovascular pathophysiology of the retina. In fact, intravitreal injection of certain antisense DNA constructs targeting VEGF mRNA have been found to be antiangiogenic in this model, as were soluble VEGF receptor chimeric proteins designed to bind VEGF in the vitreous humor (Aiello et al., 1995, Proc. Natl. Acad. Sci. USA 92: 10457-10461; Robinson et al., 1996, Proc. Natl. Acad. Sci. USA 93: 4851-4856; Pierce et al., 1996, Archives of Ophthalmology 114: 1219-1228).

[0325] Summary of experiment: The effect of an anti-KDR/Flk-1 ribozyme on the peak level of neovascularization was tested in the mouse model described above. As shown in FIG. 34A, P7 mice were removed from the hyperoxic chamber and the mice received two intraocular injections (P12 and P13) in the right eye of 10 μg RPI.4731, the anti-KDR/Flk-1 ribozyme. The left eye of each mouse was treated as a control and received intraocular injections of saline. Five days after being exposed to room air, neovascular nuclei in the retina of both eyes were counted. Data are presented in FIG. 34B. There was a significant decrease in retinal neovascularization (approximately 40%) compared to the control, saline-injected eyes.

[0326] RPI.4731 sequence and chemical composition:

(SEQ ID NO: 13488)

5′-u_{S}a_{S}c_{S} a_{S}au ucU GAu Gag gcg aaa gcc Gaa Aag aca
aB-3′

[0327] where:
[0328] uppercase G, A=ribonucleotides
[0329] lowercase=2′-OMe
[0330] U=2′-C-allyl uridine
[0331] B=inverted abasic nucleotide
[0332] S=phosphorothioate linkage

### Example 17

### Therapeutic Effects of Anti-flt-1 and Anti-KDR Ribozymes Against Primary and Metastatic 4T1 Murine Mammary Carcinoma

[0333] Cleavage of flt-1 and/or kdr mRNA should result in down regulation of VEGF receptor subtypes 1 and 2, respectively. As described in the Examples above, treatment of animals with a ribozyme that specifically binds to and cleaves flt-1 mRNA (ANGIOZYME) results in reduced primary tumor growth and/or decreased metastases in murine models of lung (LLC-HM murine lung carcinoma) and colorectal carcinoma (KM12L4a). The purpose of this study was to determine the effects of treatment with ANGIOZYME and an anti-kdr ribozyme in a murine model of mammary carcinoma that spontaneously metastasizes.

[0334] Methods: The 4T1 murine mammary carcinoma (syngeneic to BALB/c mice) forms progressive subcutaneous (SC) tumors that spontaneously metastasize to regional lymph nodes, lung, liver and brain in a manner similar to human breast cancer. Mice were inoculated with 4T1 tumor cells either subcutaneously or in the hindlimb footpad and primary tumor growth, number of pulmonary metastases and overall survival were assessed. ANGIOZYME and the anti-kdr ribozyme was administered at varying doses and schedules.

[0335] Results: Table 24 shows the number of spontaneous pulmonary metastases resulting from 4T1 tumor inoculation in mice treated with ANGIOZYME compares to controls. Mice treated with ANGIOZYME alone showed no significant delay in 3-day established SC tumor growth as compared to controls. However, the development of spontaneous pulmonary metastases was significantly reduced in mice treated with ANGIOZYME at either 300 or 600 mg/m²/d (see Table 24). Mice treated with ANGIOZYME on days 3-32, with surgical removal of the primary tumor site on day 14, had a significant survival advantage (60% and 80% long-term cure, respectively) as compared to control mice, mice treated on days 3-14 only, or mice treated following removal of the primary tumor. Although combination treatment with ANGIOZYME and an anti-kdr ribozyme had no additional effect on pulmonary metastases at the doses tested, there was an additive reduction in primary SC tumor growth (see FIG. 35).

[0336] Conclusion: In 4T1 metastatic mammary carcinoma models, ANGIOZYME treatment significantly reduced pulmonary metastases and conferred a significant survival benefit compared to control, vehicle treated animals. The combined effects of an anti-kdr ribozyme and ANGIOZYME suggest that targeted down regulation of VEGFR1 and VEGFR2 may provide significant therapeutic advantages in vivo.

### Example 18

### Antiangiogenic Activity of ANGIOZYME Combined with Interferon-Alpha2b

[0337] IFN-alpha2b and IFN-alpha have been shown to inhibit tumor angiogenesis in human xenografts when administered as single agents. As described in the Examples above, treatment of animals with a ribozyme that specifically binds to and cleaves flt-1 mRNA (ANGIOZYME) results in reduced primary tumor growth and/or decreased metastases in murine models of lung (LLC-HM murine lung carcinoma) and colorectal carcinoma (KM12L4a). Therefore, the combination of interferon and nucleic acid molecules (enzymatic nucleic acid molecules, antisense, siNA) targeting VEGF receptors may have an additive or synergistic effect on inhibition of angiogenesis, thus providing an additional treatment option for diseases and conditions described herein. The purpose of this study was to determine the effects of treatment with ANGIOZYME and IFN-alpha2b in the murine dermis model of angiogenesis.

[0338] Methods: The murine dermis model was used to assess the effects of the combined treatment of IFN-alpha2b and ANGIOZYME, a ribozyme directed against the vascular endothelial growth factor receptor-1 (VEGFR-1) mRNA. On day zero, two million tumor cells (human Hey ovarian, ACHN renal, SK-MEL-1 melanoma, or LNCaP prostate) were inoculated in the dermis of the flanks of athymic nude mice. Recombinant IFN-alpha2b (Intron, specific activity 1-2×10⁸ units/mg protein) and ANGIOZYME were used in these studies. Various dosages and schedules of IFN-alpha2b (0.1 mL subcutaneously) and ANGIOZYME (0.1 mL subcutaneously) were used. Mice were sacrificed on day 10 (avertin 0.5 mL intraperitoneally) and the tumor site was assessed for neovascularization by enumeration of radially oriented vessels under a dissecting microscope, measured by an observer blinded as to treatment group.

[0339] Results: In all four cell lines, treatment with ANGIOZYME or IFN-alpha2b alone, at doses which did not effect cell proliferation, resulted in a dose-dependent decrease in the mean number of peritumoral vessels. Escalating the ANGIOZYME dose (0.5, 1.0, 2.0 mg/day) resulted in a statistically significant decrease in the number of peritumoral vessels. In Hey ovarian tumors vessel number was reduced by 19%, 45%, 71% following ANGIOZYME dosing of 0.5, 1.0, 2.0 mg/mouse/day, respectively. In all cell lines, daily doses of 10⁴ U IFN-α2b yielded a statistically significant decrease (p<0.05) in vessel counts when compared to control untreated animals. Similarly, 10⁵ U IFN-alpha2b was superior to 10⁴ U in all cell lines (p<0.05). In three of four cell lines, increasing the IFN-alpha2b dose to 10⁶ U did not provide added benefit. Combination treatment with suboptimal doses of ANGIOZYME (0.5 mg/day) and IFN-alpha2b (10⁴ U/day) resulted in synergistic anti-angiogenic activity in three out of four cell lines. In Hey tumors, single agent ANGIOZYME and IFN-alpha2b caused a 25% and 20% reduction, respectively, whereas the combination resulted in a 76% reduction in vessel number. Similarly, in SK-Mel-1 tumors, single agent ANGIOZYME and IFN-alpha2b caused a 17% and 19% reduction, respectively, whereas the combination resulted in a 81% reduction in vessel number. Median effect analysis yielded a combination index of 0.032 (Hey cells) and <0.00001 (SK-Mel-1 cells), indicating strong anti-angiogenic synergy between ANGIOZYME and IFN-alpha2b.

### Indications

[0340] The nucleic acid molecules discussed herein are useful in the prevention or treatment of the following exemplary conditions related to the level of VEG-F:

[0341] I) Tumor angiogenesis: Angiogenesis has been shown to be necessary for tumors to grow into pathological size (Folkman, 1971, PNAS 76, 5217-5221; Wellstein & Czubayko, 1996, Breast Cancer Res and Treatment 38, 109-119). In addition, it allows tumor cells to travel through the circulatory system during metastasis. Increased levels of gene expression of a number of angiogenic factors such as vascular endothelial growth factor (VEGF) have been reported in vascularized and edema-associated brain tumors (Berkman et al., 1993 J. Clini. Invest. 91, 153). A more direct demonstration of the role of VEGF in tumor angiogenesis was demonstrated by Jim Kim et al., 1993 Nature 362,841 wherein, monoclonal antibodies against VEGF were successfully used to inhibit the growth of rhabdomyosarcoma, glioblastoma multiforme cells in nude mice. Similarly, expression of a dominant negative mutated form of the flt-1 VEGF receptor inhibits vascularization induced by human glioblastoma cells in nude mice (Millauer et al., 1994, Nature 367, 576). Specific tumor/cancer types that can be targeted using the nucleic acid molecules of the invention include but are not limited to the tumor/cancer types described under Diagnosis in Table XX.

[0342] 2) Ocular diseases: Neovascularization has been shown to cause or exacerbate ocular diseases including but not limited to, macular degeneration, neovascular glaucoma, diabetic retinopathy, myopic degeneration, and trachoma (Norrby, 1997, APMIS 105, 417-437). Aiello et al., 1994 New Engl. J. Med. 331, 1480, showed that the ocular fluid, of a majority of subjects suffering from diabetic retinopathy and other retinal disorders, contains a high concentration of VEGF. Miller et al., 1994 Am. J. Pathol. 145, 574, reported elevated levels of VEGF mRNA in subjects suffering from retinal ischemia. These observations support a direct role for VEGF in ocular diseases. Other factors, including those that stimulate VEGF synthesis, may also contribute to these indications.

[0343] 3) Dermatological Disorders: Many indications have been identified which may be angiogenesis dependent including, but not limited to, psoriasis, verruca vulgaris, angiofibroma of tuberous sclerosis, pot-wine stains, Sturge Weber syndrome, Kippel-Trenaunay-Weber syndrome, and Osler-Weber-Rendu syndrome (Norrby, supra). Intradermal injection of the angiogenic factor b-FGF demonstrated angiogenesis in nude mice (Weckbecker et al., 1992, Angiogenesis: Key principles-Science-Technology-Medicine, ed R. Steiner) Detmar et al., 1994 J. Exp. Med. 180, 1141 reported that VEGF and its receptors were over-expressed in psoriatic skin and psoriatic dermal microvessels, suggesting that VEGF plays a significant role in psoriasis.

[0344] 4) Rheumatoid arthritis: Immunohistochemistry and in situ hybridization studies on tissues from the joints of subjects suffering from rheumatoid arthritis show an increased level of VEGF and its receptors (Fava et al., 1994 J. Exp. Med. 180, 341). Additionally, Koch et al., 1994 J. Immunol. 152, 4149, found that VEGF-specific antibodies were able to significantly reduce the mitogenic activity of synovial tissues from subjects suffering from rheumatoid arthritis. These observations support a direct role for VEGF in rheumatoid arthritis. Other angiogenic factors including those of the present invention may also be involved in arthritis.

[0345] 5) Autosomal dominant polycystic kidney disease (ADPKD): ADPKD is the most common life threatening hereditary disease in the USA. It affects about 1:400 to 1:1000 people. Approximately 50% of people with ADPKD develop renal failure. ADPKD accounts for about 5-10% of end-stage renal failure in the USA requiring dialysis and renal transplantation. The Han:SPRD rat model, mice with a targeted mutation in the Pkd2 gene, and congenital polycystic kidney (cpk) mice closely resemble human ADPKD and present an opportunity to evaluate the therapeutic effect of agents that have the potential to interfere with one or more of the pathogenic elements of ADPKD. One feature of ADPKD is angiogenesis, which may be necessary for growth of cyst cells as well as increased vascular permeability, promoting fluid secretion into cysts. Proliferation of cystic epithelium is also a feature of ADPKD. Cyst cells in culture produce soluble vascular endothelial growth factor (VEGF), which is proven to be specific and critical for blood vessel formation. VEGF is also the best validated target for anti-angiogenesis therapies based on overwhelming genetic, mechanistic and animal efficacy data. However, VEGF can also directly stimulate proliferation of epithelial cells. VEGF triggers a response by interacting with cell-surface receptors. VEGFR1 has been detected in epithelial cells of cystic tubules but not in endothelial cells in the vasculature of cystic kidneys or normal kidneys. VEGFR2 expression is increased in endothelial cells of cyst vessels and in endothelial cells during renal ischemia-reperfusion. It is proposed that inhibition of VEGF receptors with anti-VEGFR1 and anti-VEGFR2 (KDR) agents (eg. nucleic acid molecules of the invention) would attenuate cyst formation, renal failure and mortality in ADPKD. Anti-VEGFR2 agents (eg. nucleic acid molecules of the invention) would inhibit angiogenesis involved in cyst formation. As VEGFR1 is present in cystic epithelium and not in vascular endothelium of cysts, it is proposed that anti-VEGFR1 agents would attenuate cystic epithelial cell proliferation and apoptosis which would in turn lead to less cyst formation. Further, it is proposed that VEGF produced by cystic epithelial cells is one of the stimuli for angiogenesis as well as epithelial cell proliferation and apoptosis. Validation assays for nucleic acid molecules of the invention can be performed in Han:SPRD rats, mice with a targeted mutation in the Pkd2 gene, and cpk mice. The effect of anti-VEGF nucleic acids on cyst formation and renal failure can determine the potential harmful role of angiogenesis in ADPKD.

### Combination Therapies

[0346] Gemcytabine and cyclophosphamide are non-limiting examples of chemotherapeutic agents that can be combined with or used in conjunction with the nucleic acid molecules (e.g. enzymatic nucleic acid and antisense molecules) of the instant invention to prevent and/or treat VEG-F related conditions. Those skilled in the art will recognize that other anti-angiogenic and/or anti-cancer compounds and therapies can be similarly be readily combined with the nucleic acid molecules of the instant invention (e.g. ribozymes and antisense molecules) and are hence within the scope of the instant invention. Such compounds and therapies are well known in the art (see for example Cancer: Principles and Practice of Oncology, Volumes 1 and 2, eds Devita, V. T., Hellman, S., and Rosenberg, S. A., J.B. Lippincott Company, Philadelphia, USA; incorporated herein by reference) and include, without limitations, folates, antifolates, pyrimidine analogs, fluoropyrimidines, purine analogs, adenosine analogs, topoisomerase I inhibitors, anthrapyrazoles, retinoids, antibiotics, anthacyclins, platinum analogs, alkylating agents, nitrosoureas, plant derived compounds such as vinca alkaloids, epipodophyllotoxins, tyrosine kinase inhibitors, taxols, radiation therapy, surgery, nutritional supplements, gene therapy, radiotherapy, for example 3D-CRT, immunotoxin therapy, for example ricin, and monoclonal antibodies. Specific examples of chemotherapeutic compounds that can be combined with or used in conjunction with the nucleic acid molecules of the invention include, but are not limited to, Paclitaxel; Docetaxel; Methotrexate; Doxorubin; Edatrexate; Vinorelbine; Tomaxifen; Leucovorin; 5-fluoro uridine (5-FU); Ionotecan; Cisplatin; Carboplatin; Amsacrine; Cytarabine; Bleomycin; Mitomycin C; Dactinomycin; Mithramycin; Hexamethylmelamine; Dacarbazine; L-asperginase; Nitrogen mustard; Melphalan, Chlorambucil; Busulfan; Ifosfamide; 4-hydroperoxycyclophosphamide, Thiotepa; Irinotecan (CAMPTOSAR®, CPT-11, Camptothecin-11, Campto) Tamoxifen, Herceptin; IMC C225; ABX-EGF: and combinations thereof.

### Diagnostic Uses

[0347] The nucleic acid molecules of this invention (e.g., enzymatic nucleic acid) can be used as diagnostic tools to examine genetic drift and mutations within diseased cells or to detect the presence of flt-1, KDR and/or flk-1 RNA in a cell. The close relationship between enzymatic nucleic acid activity and the structure of the target RNA allows the detection of mutations in any region of the molecule which alters the base-pairing and three-dimensional structure of the target RNA. By using multiple enzymatic nucleic acids described in this invention, one can map nucleotide changes which are important to RNA structure and function in vitro, as well as in cells and tissues. Cleavage of target RNAs with enzymatic nucleic acid can be used to inhibit gene expression and define the role (essentially) of specified gene products in the progression of disease. In this manner, other genetic targets can be defined as important mediators of the disease. These experiments can lead to better treatment of the disease progression by affording the possibility of combinational therapies (e.g., multiple enzymatic nucleic acids targeted to different genes, enzymatic nucleic acids coupled with known small molecule inhibitors, or intermittent treatment with combinations of enzymatic nucleic acids and/or other chemical or biological molecules). Other in vitro uses of enzymatic nucleic acids of the invention are well known in the art, and include detection of the presence of mRNAs associated with flt-1, KDR and/or flk-1 related condition. Such RNA is detected by determining the presence of a cleavage product after treatment with a ribozyme using standard methodology.

[0348] In a specific example, enzymatic nucleic acids which can cleave only wild-type or mutant forms of the target RNA are used for the assay. The first enzymatic nucleic acid is used to identify wild-type RNA present in the sample and the second enzymatic nucleic acid is used to identify mutant RNA in the sample. As reaction controls, synthetic substrates of both wild-type and mutant RNA are cleaved by both enzymatic nucleic acids to demonstrate the relative enzymatic nucleic acid efficiencies in the reactions and the absence of cleavage of the “non-targeted” RNA species. The cleavage products from the synthetic substrates also serve to generate size markers for the analysis of wild-type and mutant RNAs in the sample population. Thus, each analysis requires two enzymatic nucleic acids, two substrates and one unknown sample which is combined into six reactions. The presence of cleavage products is determined using an RNAse protection assay so that full-length and cleavage fragments of each RNA can be analyzed in one lane of a polyacrylamide gel. It is not absolutely required to quantify the results to gain insight into the expression of mutant RNAs and putative risk of the desired phenotypic changes in target cells. The expression of mRNA whose protein product is implicated in the development of the phenotype (i.e., flt-1, KDR and/or flk-1) is adequate to establish risk. If probes of comparable specific activity are used for both transcripts, then a qualitative comparison of RNA levels is adequate and decreases the cost of the initial diagnosis. Higher mutant form to wild-type ratios is correlated with higher risk whether RNA levels are compared qualitatively or quantitatively. The use of enzymatic nucleic acid molecules in diagnostic applications contemplated by the instant invention is more fully described in George et al., U.S. Pat. Nos. 5,834,186 and 5,741,679, Shih et al., U.S. Pat. No. 5,589,332, Nathan et al., U.S. Pat. No. 5,871,914, Nathan and Ellington, International PCT publication No. WO 00/24931, Breaker et al., International PCT Publication Nos. WO 00/26226 and 98/27104, and Sullenger et al., International PCT publication No. WO 99/29842.

### Additional Uses

[0349] Potential usefulness of sequence-specific enzymatic nucleic acid molecules of the instant invention have many of the same applications for the study of RNA that DNA restriction endonucleases have for the study of DNA (Nathans et al., 1975 Ann. Rev. Biochem. 44:273). For example, the pattern of restriction fragments can be used to establish sequence relationships between two related RNAs, and large RNAs can be specifically cleaved to fragments of a size more useful for study. The ability to engineer sequence specificity of the enzymatic nucleic acid molecule is ideal for cleavage of RNAs of unknown sequence. Applicant describes the use of nucleic acid molecules to down-regulate gene expression of target genes in bacterial, microbial, fungal, viral, and eukaryotic systems including plant, or mammalian cells.

[0350] All patents and publications mentioned in the specification are indicative of the levels of skill of those skilled in the art to which the invention pertains. All references cited in this disclosure are incorporated by reference to the same extent as if each reference had been incorporated by reference in its entirety individually.

[0351] One skilled in the art would readily appreciate that the present invention is well adapted to carry out the objects and obtain the ends and advantages mentioned, as well as those inherent therein. The methods and compositions described herein as presently representative of preferred embodiments are exemplary and are not intended as limitations on the scope of the invention. Changes therein and other uses will occur to those skilled in the art, which are encompassed within the spirit of the invention, are defined by the scope of the claims.

[0352] It will be readily apparent to one skilled in the art that varying substitutions and modifications may be made to the invention disclosed herein without departing from the scope and spirit of the invention. Thus, such additional embodiments are within the scope of the present invention and the following claims.

[0353] The invention illustratively described herein suitably may be practiced in the absence of any element or elements, limitation or limitations which is not specifically disclosed herein. Thus, for example, in each instance herein any of the terms “comprising”, “consisting essentially of” and “consisting of” may be replaced with either of the other two terms. The terms and expressions which have been employed are used as terms of description and not of limitation, and there is no intention that in the use of such terms and expressions of excluding any equivalents of the features shown and described or portions thereof, but it is recognized that various modifications are possible within the scope of the invention claimed. Thus, it should be understood that although the present invention has been specifically disclosed by preferred embodiments, optional features, modification and variation of the concepts herein disclosed may be resorted to by those skilled in the art, and that such modifications and variations are considered to be within the scope of this invention as defined by the description and the appended claims.

[0354] In addition, where features or aspects of the invention are described in terms of Markush groups or other grouping of alternatives, those skilled in the art will recognize that the invention is also thereby described in terms of any individual member or subgroup of members of the Markush group or other group.

[0355] Other embodiments are within the claims that follow.

Lengthy table referenced here
US20090170197A1-20090702-T00001
Please refer to the end of the specification for access instructions.

LENGTHY TABLES
The patent application contains a lengthy table section. A copy of the table is available in electronic form from the USPTO web site (http://seqdata.uspto.gov/?pageRequest=docDetail&DocID=US20090170197A1). An electronic copy of the table will also be available from the USPTO upon request and payment of the fee set forth in 37 CFR 1.19(b)(3).

The application's sequence listing, which the Patent Office published only in electronic form, follows.

SEQUENCE LISTING (20824 sequences)

SEQ ID NO: 1 - RNA, 17 nt, Homo sapiens
cggacacuccucucggc

SEQ ID NO: 2 - RNA, 17 nt, Homo sapiens
acacuccucucggcucc

SEQ ID NO: 3 - RNA, 17 nt, Homo sapiens
acuccucucggcuccuc

SEQ ID NO: 4 - RNA, 17 nt, Homo sapiens
ucucggcuccuccccgg

SEQ ID NO: 5 - RNA, 17 nt, Homo sapiens
cggcuccuccccggcag

SEQ ID NO: 6 - RNA, 17 nt, Homo sapiens
cggcggcucggagcggg

SEQ ID NO: 7 - RNA, 17 nt, Homo sapiens
agcgggcuccggggcuc

SEQ ID NO: 8 - RNA, 17 nt, Homo sapiens
ccggggcucgggugcag

SEQ ID NO: 9 - RNA, 17 nt, Homo sapiens
gcgaggauuacccgggg

SEQ ID NO: 10 - RNA, 17 nt, Homo sapiens
cgaggauuacccgggga

SEQ ID NO: 11 - RNA, 17 nt, Homo sapiens
gaagugguugucuccug

SEQ ID NO: 12 - RNA, 17 nt, Homo sapiens
gugguugucuccuggcu

SEQ ID NO: 13 - RNA, 17 nt, Homo sapiens
gguugucuccuggcugg

SEQ ID NO: 14 - RNA, 17 nt, Homo sapiens
cgggcgcucagggcgcg

SEQ ID NO: 15 - RNA, 17 nt, Homo sapiens
gacggacucuggcggcc

SEQ ID NO: 16 - RNA, 17 nt, Homo sapiens
ggccgggucguuggccg

SEQ ID NO: 17 - RNA, 17 nt, Homo sapiens
cgggucguuggccgggg

SEQ ID NO: 18 - RNA, 17 nt, Homo sapiens
ggccgcgucgcgcucac

SEQ ID NO: 19 - RNA, 17 nt, Homo sapiens
gucgcgcucaccauggu

SEQ ID NO: 20 - RNA, 17 nt, Homo sapiens
accauggucagcuacug

SEQ ID NO: 21 - RNA, 17 nt, Homo sapiens
ggucagcuacugggaca

SEQ ID NO: 22 - RNA, 17 nt, Homo sapiens
accgggguccugcugug

SEQ ID NO: 23 - RNA, 17 nt, Homo sapiens
gcgcugcucagcugucu

SEQ ID NO: 24 - RNA, 17 nt, Homo sapiens
ucagcugucugcuucuc

SEQ ID NO: 25 - RNA, 17 nt, Homo sapiens
ugucugcuucucacagg

SEQ ID NO: 26 - RNA, 17 nt, Homo sapiens
gucugcuucucacagga

SEQ ID NO: 27 - RNA, 17 nt, Homo sapiens
cugcuucucacaggauc

SEQ ID NO: 28 - RNA, 17 nt, Homo sapiens
cacaggaucuaguucag

SEQ ID NO: 29 - RNA, 17 nt, Homo sapiens
caggaucuaguucaggu

SEQ ID NO: 30 - RNA, 17 nt, Homo sapiens
gaucuaguucagguuca

SEQ ID NO: 31 - RNA, 17 nt, Homo sapiens
aucuaguucagguucaa

SEQ ID NO: 32 - RNA, 17 nt, Homo sapiens
guucagguucaaaauua

SEQ ID NO: 33 - RNA, 17 nt, Homo sapiens
uucagguucaaaauuaa

SEQ ID NO: 34 - RNA, 17 nt, Homo sapiens
uucaaaauuaaaagauc

SEQ ID NO: 35 - RNA, 17 nt, Homo sapiens
ucaaaauuaaaagaucc

SEQ ID NO: 36 - RNA, 17 nt, Homo sapiens
uaaaagauccugaacug

SEQ ID NO: 37 - RNA, 17 nt, Homo sapiens
aacugaguuuaaaaggc

SEQ ID NO: 38 - RNA, 17 nt, Homo sapiens
acugaguuuaaaaggca

SEQ ID NO: 39 - RNA, 17 nt, Homo sapiens
cugaguuuaaaaggcac

SEQ ID NO: 40 - RNA, 17 nt, Homo sapiens
cagcacaucaugcaagc

SEQ ID NO: 41 - RNA, 17 nt, Homo sapiens
cacugcaucuccaaugc

SEQ ID NO: 42 - RNA, 17 nt, Homo sapiens
cugcaucuccaaugcag

SEQ ID NO: 43 - RNA, 17 nt, Homo sapiens
cagcccauaaauggucu

SEQ ID NO: 44 - RNA, 17 nt, Homo sapiens
uaaauggucuuugccug

SEQ ID NO: 45 - RNA, 17 nt, Homo sapiens
aauggucuuugccugaa

SEQ ID NO: 46 - RNA, 17 nt, Homo sapiens
auggucuuugccugaaa

SEQ ID NO: 47 - RNA, 17 nt, Homo sapiens
uggugaguaaggaaagc

SEQ ID NO: 48 - RNA, 17 nt, Homo sapiens
cugagcauaacuaaauc

SEQ ID NO: 49 - RNA, 17 nt, Homo sapiens
gcauaacuaaaucugcc

SEQ ID NO: 50 - RNA, 17 nt, Homo sapiens
aacuaaaucugccugug

SEQ ID NO: 51 - RNA, 17 nt, Homo sapiens
caaacaauucugcagua

SEQ ID NO: 52 - RNA, 17 nt, Homo sapiens
aaacaauucugcaguac

SEQ ID NO: 53 - RNA, 17 nt, Homo sapiens
ucugcaguacuuuaacc

SEQ ID NO: 54 - RNA, 17 nt, Homo sapiens
gcaguacuuuaaccuug

SEQ ID NO: 55 - RNA, 17 nt, Homo sapiens
caguacuuuaaccuuga

SEQ ID NO: 56 - RNA, 17 nt, Homo sapiens
aguacuuuaaccuugaa

SEQ ID NO: 57 - RNA, 17 nt, Homo sapiens
uuuaaccuugaacacag

SEQ ID NO: 58 - RNA, 17 nt, Homo sapiens
acacagcucaagcaaac

SEQ ID NO: 59 - RNA, 17 nt, Homo sapiens
cacuggcuucuacagcu

SEQ ID NO: 60 - RNA, 17 nt, Homo sapiens
acuggcuucuacagcug

SEQ ID NO: 61 - RNA, 17 nt, Homo sapiens
uggcuucuacagcugca

SEQ ID NO: 62 - RNA, 17 nt, Homo sapiens
cugcaaauaucuagcug

SEQ ID NO: 63 - RNA, 17 nt, Homo sapiens
gcaaauaucuagcugua

SEQ ID NO: 64 - RNA, 17 nt, Homo sapiens
aaauaucuagcuguacc

SEQ ID NO: 65 - RNA, 17 nt, Homo sapiens
cuagcuguaccuacuuc

SEQ ID NO: 66 - RNA, 17 nt, Homo sapiens
cuguaccuacuucaaag

SEQ ID NO: 67 - RNA, 17 nt, Homo sapiens
uaccuacuucaaagaag

SEQ ID NO: 68 - RNA, 17 nt, Homo sapiens
accuacuucaaagaaga

SEQ ID NO: 69 - RNA, 17 nt, Homo sapiens
aacagaaucugcaaucu

SEQ ID NO: 70 - RNA, 17 nt, Homo sapiens
ucugcaaucuauauauu

SEQ ID NO: 71 - RNA, 17 nt, Homo sapiens
ugcaaucuauauauuua

SEQ ID NO: 72 - RNA, 17 nt, Homo sapiens
caaucuauauauuuauu

SEQ ID NO: 73 - RNA, 17 nt, Homo sapiens
aucuauauauuuauuag

SEQ ID NO: 74 - RNA, 17 nt, Homo sapiens
cuauauauuuauuagug

SEQ ID NO: 75 - RNA, 17 nt, Homo sapiens
uauauauuuauuaguga

SEQ ID NO: 76 - RNA, 17 nt, Homo sapiens
auauauuuauuagugau

SEQ ID NO: 77 - RNA, 17 nt, Homo sapiens
auauuuauuagugauac

SEQ ID NO: 78 - RNA, 17 nt, Homo sapiens
uauuuauuagugauaca

SEQ ID NO: 79 - RNA, 17 nt, Homo sapiens
uuagugauacagguaga

SEQ ID NO: 80 - RNA, 17 nt, Homo sapiens
auacagguagaccuuuc

SEQ ID NO: 81 - RNA, 17 nt, Homo sapiens
guagaccuuucguagag

SEQ ID NO: 82 - RNA, 17 nt, Homo sapiens
uagaccuuucguagaga

SEQ ID NO: 83 - RNA, 17 nt, Homo sapiens
agaccuuucguagagau

SEQ ID NO: 84 - RNA, 17 nt, Homo sapiens
ccuuucguagagaugua

SEQ ID NO: 85 - RNA, 17 nt, Homo sapiens
agagauguacagugaaa

SEQ ID NO: 86 - RNA, 17 nt, Homo sapiens
agugaaauccccgaaau

SEQ ID NO: 87 - RNA, 17 nt, Homo sapiens
cccgaaauuauacacau

SEQ ID NO: 88 - RNA, 17 nt, Homo sapiens
ccgaaauuauacacaug

SEQ ID NO: 89 - RNA, 17 nt, Homo sapiens
gaaauuauacacaugac

SEQ ID NO: 90 - RNA, 17 nt, Homo sapiens
agggagcucgucauucc

SEQ ID NO: 91 - RNA, 17 nt, Homo sapiens
gagcucgucauucccug

SEQ ID NO: 92 - RNA, 17 nt, Homo sapiens
cucgucauucccugccg

SEQ ID NO: 93 - RNA, 17 nt, Homo sapiens
ucgucauucccugccgg

SEQ ID NO: 94 - RNA, 17 nt, Homo sapiens
ugccggguuacgucacc

SEQ ID NO: 95 - RNA, 17 nt, Homo sapiens
gccggguuacgucaccu

SEQ ID NO: 96 - RNA, 17 nt, Homo sapiens
gguuacgucaccuaaca

SEQ ID NO: 97 - RNA, 17 nt, Homo sapiens
cgucaccuaacaucacu

SEQ ID NO: 98 - RNA, 17 nt, Homo sapiens
ccuaacaucacuguuac

SEQ ID NO: 99 - RNA, 17 nt, Homo sapiens
aucacuguuacuuuaaa

SEQ ID NO: 100 - RNA, 17 nt, Homo sapiens
ucacuguuacuuuaaaa

SEQ ID NO: 101 - RNA, 17 nt, Homo sapiens
cuguuacuuuaaaaaag

SEQ ID NO: 102 - RNA, 17 nt, Homo sapiens
uguuacuuuaaaaaagu

SEQ ID NO: 103 - RNA, 17 nt, Homo sapiens
guuacuuuaaaaaaguu

SEQ ID NO: 104 - RNA, 17 nt, Homo sapiens
aaaaaaguuuccacuug

SEQ ID NO: 105 - RNA, 17 nt, Homo sapiens
aaaaaguuuccacuuga

SEQ ID NO: 106 - RNA, 17 nt, Homo sapiens
aaaaguuuccacuugac

SEQ ID NO: 107 - RNA, 17 nt, Homo sapiens
uuuccacuugacacuuu

SEQ ID NO: 108 - RNA, 17 nt, Homo sapiens
uugacacuuugaucccu

SEQ ID NO: 109 - RNA, 17 nt, Homo sapiens
ugacacuuugaucccug

SEQ ID NO: 110 - RNA, 17 nt, Homo sapiens
acuuugaucccugaugg

SEQ ID NO: 111 - RNA, 17 nt, Homo sapiens
aaacgcauaaucuggga

SEQ ID NO: 112 - RNA, 17 nt, Homo sapiens
cgcauaaucugggacag

SEQ ID NO: 113 - RNA, 17 nt, Homo sapiens
gggacaguagaaagggc

SEQ ID NO: 114 - RNA, 17 nt, Homo sapiens
aaagggcuucaucauau

SEQ ID NO: 115 - RNA, 17 nt, Homo sapiens
aagggcuucaucauauc

SEQ ID NO: 116 - RNA, 17 nt, Homo sapiens
ggcuucaucauaucaaa

SEQ ID NO: 117 - RNA, 17 nt, Homo sapiens
uucaucauaucaaaugc

SEQ ID NO: 118 - RNA, 17 nt, Homo sapiens
caucauaucaaaugcaa

SEQ ID NO: 119 - RNA, 17 nt, Homo sapiens
ugcaacguacaaagaaa

SEQ ID NO: 120 - RNA, 17 nt, Homo sapiens
aaagaaauagggcuucu

SEQ ID NO: 121 - RNA, 17 nt, Homo sapiens
auagggcuucugaccug

SEQ ID NO: 122 - RNA, 17 nt, Homo sapiens
uagggcuucugaccugu

SEQ ID NO: 123 - RNA, 17 nt, Homo sapiens
gcaacagucaaugggca

SEQ ID NO: 124 - RNA, 17 nt, Homo sapiens
augggcauuuguauaag

SEQ ID NO: 125 - RNA, 17 nt, Homo sapiens
ugggcauuuguauaaga

SEQ ID NO: 126 - RNA, 17 nt, Homo sapiens
gcauuuguauaagacaa

SEQ ID NO: 127 - RNA, 17 nt, Homo sapiens
auuuguauaagacaaac

SEQ ID NO: 128 - RNA, 17 nt, Homo sapiens
gacaaacuaucucacac

SEQ ID NO: 129 - RNA, 17 nt, Homo sapiens
caaacuaucucacacau

SEQ ID NO: 130 - RNA, 17 nt, Homo sapiens
aacuaucucacacaucg

SEQ ID NO: 131 - RNA, 17 nt, Homo sapiens
ucacacaucgacaaacc

SEQ ID NO: 132 - RNA, 17 nt, Homo sapiens
aaaccaauacaaucaua

SEQ ID NO: 133 - RNA, 17 nt, Homo sapiens
aauacaaucauagaugu

SEQ ID NO: 134 - RNA, 17 nt, Homo sapiens
acaaucauagaugucca

SEQ ID NO: 135 - RNA, 17 nt, Homo sapiens
auagauguccaaauaag

SEQ ID NO: 136 - RNA, 17 nt, Homo sapiens
guccaaauaagcacacc

SEQ ID NO: 137 - RNA, 17 nt, Homo sapiens
cgcccagucaaauuacu

SEQ ID NO: 138 - RNA, 17 nt, Homo sapiens
agucaaauuacuuagag

SEQ ID NO: 139 - RNA, 17 nt, Homo sapiens
gucaaauuacuuagagg

SEQ ID NO: 140 - RNA, 17 nt, Homo sapiens
aaauuacuuagaggcca

SEQ ID NO: 141 - RNA, 17 nt, Homo sapiens
aauuacuuagaggccau

SEQ ID NO: 142 - RNA, 17 nt, Homo sapiens
gaggccauacucuuguc

SEQ ID NO: 143 - RNA, 17 nt, Homo sapiens
gccauacucuuguccuc

SEQ ID NO: 144 - RNA, 17 nt, Homo sapiens
cauacucuuguccucaa

SEQ ID NO: 145 - RNA, 17 nt, Homo sapiens
acucuuguccucaauug

SEQ ID NO: 146 - RNA, 17 nt, Homo sapiens
cuuguccucaauuguac

SEQ ID NO: 147 - RNA, 17 nt, Homo sapiens
uccucaauuguacugcu

SEQ ID NO: 148 - RNA, 17 nt, Homo sapiens
ucaauuguacugcuacc

SEQ ID NO: 149 - RNA, 17 nt, Homo sapiens
guacugcuaccacuccc

SEQ ID NO: 150 - RNA, 17 nt, Homo sapiens
cuaccacucccuugaac

SEQ ID NO: 151 - RNA, 17 nt, Homo sapiens
cacucccuugaacacga

SEQ ID NO: 152 - RNA, 17 nt, Homo sapiens
acgagaguucaaaugac

SEQ ID NO: 153 - RNA, 17 nt, Homo sapiens
cgagaguucaaaugacc

SEQ ID NO: 154 - RNA, 17 nt, Homo sapiens
ccuggaguuacccugau

SEQ ID NO: 155 - RNA, 17 nt, Homo sapiens
cuggaguuacccugaug

SEQ ID NO: 156 - RNA, 17 nt, Homo sapiens
aaaaaaauaagagagcu

SEQ ID NO: 157 - RNA, 17 nt, Homo sapiens
agagagcuuccguaagg

SEQ ID NO: 158 - RNA, 17 nt, Homo sapiens
gagagcuuccguaaggc

SEQ ID NO: 159 - RNA, 17 nt, Homo sapiens
gcuuccguaaggcgacg

SEQ ID NO: 160 - RNA, 17 nt, Homo sapiens
cgacgaauugaccaaag

SEQ ID NO: 161 - RNA, 17 nt, Homo sapiens
aaagcaauucccaugcc

SEQ ID NO: 162 - RNA, 17 nt, Homo sapiens
aagcaauucccaugcca

SEQ ID NO: 163 - RNA, 17 nt, Homo sapiens
gccaacauauucuacag

SEQ ID NO: 164 - RNA, 17 nt, Homo sapiens
caacauauucuacagug

SEQ ID NO: 165 - RNA, 17 nt, Homo sapiens
aacauauucuacagugu

SEQ ID NO: 166 - RNA, 17 nt, Homo sapiens
cauauucuacaguguuc

SEQ ID NO: 167 - RNA, 17 nt, Homo sapiens
uacaguguucuuacuau

SEQ ID NO: 168 - RNA, 17 nt, Homo sapiens
acaguguucuuacuauu

SEQ ID NO: 169 - RNA, 17 nt, Homo sapiens
aguguucuuacuauuga

SEQ ID NO: 170 - RNA, 17 nt, Homo sapiens
guguucuuacuauugac

SEQ ID NO: 171 - RNA, 17 nt, Homo sapiens
uucuuacuauugacaaa

SEQ ID NO: 172 - RNA, 17 nt, Homo sapiens
cuuacuauugacaaaau

SEQ ID NO: 173 - RNA, 17 nt, Homo sapiens
aaaggacuuuauacuug

SEQ ID NO: 174 - RNA, 17 nt, Homo sapiens
aaggacuuuauacuugu

SEQ ID NO: 175 - RNA, 17 nt, Homo sapiens
aggacuuuauacuuguc

SEQ ID NO: 176 - RNA, 17 nt, Homo sapiens
gacuuuauacuugucgu

SEQ ID NO: 177 - RNA, 17 nt, Homo sapiens
uuuauacuugucgugua

SEQ ID NO: 178 - RNA, 17 nt, Homo sapiens
auacuugucguguaagg

SEQ ID NO: 179 - RNA, 17 nt, Homo sapiens
ugucguguaaggagugg

SEQ ID NO: 180 - RNA, 17 nt, Homo sapiens
uggaccaucauucaaau

SEQ ID NO: 181 - RNA, 17 nt, Homo sapiens
accaucauucaaaucug

SEQ ID NO: 182 - RNA, 17 nt, Homo sapiens
ccaucauucaaaucugu

SEQ ID NO: 183 - RNA, 17 nt, Homo sapiens
auucaaaucuguuaaca

SEQ ID NO: 184 - RNA, 17 nt, Homo sapiens
aaaucuguuaacaccuc

SEQ ID NO: 185 - RNA, 17 nt, Homo sapiens
aaucuguuaacaccuca

SEQ ID NO: 186 - RNA, 17 nt, Homo sapiens
uaacaccucagugcaua

SEQ ID NO: 187 - RNA, 17 nt, Homo sapiens
cagugcauauauaugau

SEQ ID NO: 188 - RNA, 17 nt, Homo sapiens
gugcauauauaugauaa

SEQ ID NO: 189 - RNA, 17 nt, Homo sapiens
gcauauauaugauaaag

SEQ ID NO: 190 - RNA, 17 nt, Homo sapiens
uauaugauaaagcauuc

SEQ ID NO: 191 - RNA, 17 nt, Homo sapiens
uaaagcauucaucacug

SEQ ID NO: 192 - RNA, 17 nt, Homo sapiens
aaagcauucaucacugu

SEQ ID NO: 193 - RNA, 17 nt, Homo sapiens
gcauucaucacugugaa

SEQ ID NO: 194 - RNA, 17 nt, Homo sapiens
ugaaacaucgaaaacag

SEQ ID NO: 195 - RNA, 17 nt, Homo sapiens
caggugcuugaaaccgu

SEQ ID NO: 196 - RNA, 17 nt, Homo sapiens
gaaaccguagcuggcaa

SEQ ID NO: 197 - RNA, 17 nt, Homo sapiens
caagcggucuuaccggc

SEQ ID NO: 198 - RNA, 17 nt, Homo sapiens
agcggucuuaccggcuc

SEQ ID NO: 199 - RNA, 17 nt, Homo sapiens
gcggucuuaccggcucu

SEQ ID NO: 200 - RNA, 17 nt, Homo sapiens
uaccggcucucuaugaa

SEQ ID NO: 201 - RNA, 17 nt, Homo sapiens
ccggcucucuaugaaag

SEQ ID NO: 202 - RNA, 17 nt, Homo sapiens
ggcucucuaugaaagug

SEQ ID NO: 203 - RNA, 17 nt, Homo sapiens
gaaggcauuucccucgc

SEQ ID NO: 204 - RNA, 17 nt, Homo sapiens
aaggcauuucccucgcc

SEQ ID NO: 205 - RNA, 17 nt, Homo sapiens
aggcauuucccucgccg

SEQ ID NO: 206 - RNA, 17 nt, Homo sapiens
auuucccucgccggaag

SEQ ID NO: 207 - RNA, 17 nt, Homo sapiens
ccggaaguuguaugguu

SEQ ID NO: 208 - RNA, 17 nt, Homo sapiens
gaaguuguaugguuaaa

SEQ ID NO: 209 - RNA, 17 nt, Homo sapiens
uguaugguuaaaagaug

SEQ ID NO: 210 - RNA, 17 nt, Homo sapiens
guaugguuaaaagaugg

SEQ ID NO: 211 - RNA, 17 nt, Homo sapiens
agauggguuaccugcga

SEQ ID NO: 212 - RNA, 17 nt, Homo sapiens
gauggguuaccugcgac

SEQ ID NO: 213 - RNA, 17 nt, Homo sapiens
ugagaaaucugcucgcu

SEQ ID NO: 214 - RNA, 17 nt, Homo sapiens
aaucugcucgcuauuug

SEQ ID NO: 215 - RNA, 17 nt, Homo sapiens
ugcucgcuauuugacuc

SEQ ID NO: 216 - RNA, 17 nt, Homo sapiens
cucgcuauuugacucgu

SEQ ID NO: 217 - RNA, 17 nt, Homo sapiens
ucgcuauuugacucgug

SEQ ID NO: 218 - RNA, 17 nt, Homo sapiens
auuugacucguggcuac

SEQ ID NO: 219 - RNA, 17 nt, Homo sapiens
ucguggcuacucguuaa

SEQ ID NO: 220 - RNA, 17 nt, Homo sapiens
uggcuacucguuaauua

SEQ ID NO: 221 - RNA, 17 nt, Homo sapiens
cuacucguuaauuauca

SEQ ID NO: 222 - RNA, 17 nt, Homo sapiens
uacucguuaauuaucaa

SEQ ID NO: 223 - RNA, 17 nt, Homo sapiens
ucguuaauuaucaagga

SEQ ID NO: 224 - RNA, 17 nt, Homo sapiens
cguuaauuaucaaggac

SEQ ID NO: 225 - RNA, 17 nt, Homo sapiens
uuaauuaucaaggacgu

SEQ ID NO: 226 - RNA, 17 nt, Homo sapiens
aaggacguaacugaaga

SEQ ID NO: 227 - RNA, 17 nt, Homo sapiens
cagggaauuauacaauc

SEQ ID NO: 228 - RNA, 17 nt, Homo sapiens
agggaauuauacaaucu

SEQ ID NO: 229 - RNA, 17 nt, Homo sapiens
ggaauuauacaaucuug

SEQ ID NO: 230 - RNA, 17 nt, Homo sapiens
uauacaaucuugcugag

SEQ ID NO: 231 - RNA, 17 nt, Homo sapiens
uacaaucuugcugagca

SEQ ID NO: 232 - RNA, 17 nt, Homo sapiens
cugagcauaaaacaguc

SEQ ID NO: 233 - RNA, 17 nt, Homo sapiens
aaaacagucaaaugugu

SEQ ID NO: 234 - RNA, 17 nt, Homo sapiens
aaauguguuuaaaaacc

SEQ ID NO: 235 - RNA, 17 nt, Homo sapiens
aauguguuuaaaaaccu

SEQ ID NO: 236 - RNA, 17 nt, Homo sapiens
auguguuuaaaaaccuc

SEQ ID NO: 237 - RNA, 17 nt, Homo sapiens
aaaaaccucacugccac

SEQ ID NO: 238 - RNA, 17 nt, Homo sapiens
cugccacucuaauuguc

SEQ ID NO: 239 - RNA, 17 nt, Homo sapiens
gccacucuaauugucaa

SEQ ID NO: 240 - RNA, 17 nt, Homo sapiens
acucuaauugucaaugu

SEQ ID NO: 241 - RNA, 17 nt, Homo sapiens
cuaauugucaaugugaa

SEQ ID NO: 242 - RNA, 17 nt, Homo sapiens
ccccagauuuacgaaaa

SEQ ID NO: 243 - RNA, 17 nt, Homo sapiens
cccagauuuacgaaaag

SEQ ID NO: 244 - RNA, 17 nt, Homo sapiens
ccagauuuacgaaaagg

SEQ ID NO: 245 - RNA, 17 nt, Homo sapiens
ggccgugucaucguuuc

SEQ ID NO: 246 - RNA, 17 nt, Homo sapiens
cgugucaucguuuccag

SEQ ID NO: 247 - RNA, 17 nt, Homo sapiens
gucaucguuuccagacc

SEQ ID NO: 248 - RNA, 17 nt, Homo sapiens
ucaucguuuccagaccc

SEQ ID NO: 249 - RNA, 17 nt, Homo sapiens
caucguuuccagacccg

SEQ ID NO: 250 - RNA, 17 nt, Homo sapiens
acccggcucucuaccca

SEQ ID NO: 251 - RNA, 17 nt, Homo sapiens
ccggcucucuacccacu

SEQ ID NO: 252 - RNA, 17 nt, Homo sapiens
ggcucucuacccacugg

SEQ ID NO: 253 - RNA, 17 nt, Homo sapiens
agacaaauccugacuug

SEQ ID NO: 254 - RNA, 17 nt, Homo sapiens
uccugacuuguaccgca

SEQ ID NO: 255 - RNA, 17 nt, Homo sapiens
ugacuuguaccgcauau

SEQ ID NO: 256 - RNA, 17 nt, Homo sapiens
uaccgcauaugguaucc

SEQ ID NO: 257 - RNA, 17 nt, Homo sapiens
cauaugguaucccucaa

SEQ ID NO: 258 - RNA, 17 nt, Homo sapiens
uaugguaucccucaacc

SEQ ID NO: 259 - RNA, 17 nt, Homo sapiens
guaucccucaaccuaca

SEQ ID NO: 260 - RNA, 17 nt, Homo sapiens
cucaaccuacaaucaag

SEQ ID NO: 261 - RNA, 17 nt, Homo sapiens
ccuacaaucaagugguu

SEQ ID NO: 262 - RNA, 17 nt, Homo sapiens
caagugguucuggcacc

SEQ ID NO: 263 - RNA, 17 nt, Homo sapiens
aagugguucuggcaccc

SEQ ID NO: 264 - RNA, 17 nt, Homo sapiens
accccuguaaccauaau

SEQ ID NO: 265 - RNA, 17 nt, Homo sapiens
guaaccauaaucauucc

SEQ ID NO: 266 - RNA, 17 nt, Homo sapiens
accauaaucauuccgaa

SEQ ID NO: 267 - RNA, 17 nt, Homo sapiens
auaaucauuccgaagca

SEQ ID NO: 268 - RNA, 17 nt, Homo sapiens
uaaucauuccgaagcaa

SEQ ID NO: 269 - RNA, 17 nt, Homo sapiens
gugugacuuuuguucca

SEQ ID NO: 270 - RNA, 17 nt, Homo sapiens
ugugacuuuuguuccaa

SEQ ID NO: 271 - RNA, 17 nt, Homo sapiens
gugacuuuuguuccaau

SEQ ID NO: 272 - RNA, 17 nt, Homo sapiens
acuuuuguuccaauaau

SEQ ID NO: 273 - RNA, 17 nt, Homo sapiens
cuuuuguuccaauaaug

SEQ ID NO: 274 - RNA, 17 nt, Homo sapiens
guuccaauaaugaagag

SEQ ID NO: 275 - RNA, 17 nt, Homo sapiens
ugaagaguccuuuaucc

SEQ ID NO: 276 - RNA, 17 nt, Homo sapiens
agaguccuuuauccugg

SEQ ID NO: 277 - RNA, 17 nt, Homo sapiens
gaguccuuuauccugga

SEQ ID NO: 278 - RNA, 17 nt, Homo sapiens
aguccuuuauccuggau

SEQ ID NO: 279 - RNA, 17 nt, Homo sapiens
uccuuuauccuggaugc

SEQ ID NO: 280 - RNA, 17 nt, Homo sapiens
aacagaauugagagcau

SEQ ID NO: 281 - RNA, 17 nt, Homo sapiens
gagagcaucacucagcg

SEQ ID NO: 282 - RNA, 17 nt, Homo sapiens
gcaucacucagcgcaug

SEQ ID NO: 283 - RNA, 17 nt, Homo sapiens
auggcaauaauagaagg

SEQ ID NO: 284 - RNA, 17 nt, Homo sapiens
gcaauaauagaaggaaa

SEQ ID NO: 285 - RNA, 17 nt, Homo sapiens
gaaagaauaagauggcu

SEQ ID NO: 286 - RNA, 17 nt, Homo sapiens
agauggcuagcaccuug

SEQ ID NO: 287 - RNA, 17 nt, Homo sapiens
uagcaccuugguugugg

SEQ ID NO: 288 - RNA, 17 nt, Homo sapiens
accuugguuguggcuga

SEQ ID NO: 289 - RNA, 17 nt, Homo sapiens
ggcugacucuagaauuu

SEQ ID NO: 290 - RNA, 17 nt, Homo sapiens
cugacucuagaauuucu

SEQ ID NO: 291 - RNA, 17 nt, Homo sapiens
ucuagaauuucuggaau

SEQ ID NO: 292 - RNA, 17 nt, Homo sapiens
cuagaauuucuggaauc

SEQ ID NO: 293 - RNA, 17 nt, Homo sapiens
uagaauuucuggaaucu

SEQ ID NO: 294 - RNA, 17 nt, Homo sapiens
ucuggaaucuacauuug

SEQ ID NO: 295 - RNA, 17 nt, Homo sapiens
uggaaucuacauuugca

SEQ ID NO: 296 - RNA, 17 nt, Homo sapiens
aucuacauuugcauagc

SEQ ID NO: 297 - RNA, 17 nt, Homo sapiens
ucuacauuugcauagcu

SEQ ID NO: 298 - RNA, 17 nt, Homo sapiens
auuugcauagcuuccaa

SEQ ID NO: 299 - RNA, 17 nt, Homo sapiens
gcauagcuuccaauaaa

SEQ ID NO: 300 - RNA, 17 nt, Homo sapiens
cauagcuuccaauaaag

SEQ ID NO: 301 - RNA, 17 nt, Homo sapiens
cuuccaauaaaguuggg

SEQ ID NO: 302 - RNA, 17 nt, Homo sapiens
aauaaaguugggacugu

SEQ ID NO: 303 - RNA, 17 nt, Homo sapiens
agaaacauaagcuuuua

SEQ ID NO: 304 - RNA, 17 nt, Homo sapiens
cauaagcuuuuauauca

SEQ ID NO: 305 - RNA, 17 nt, Homo sapiens
auaagcuuuuauaucac

SEQ ID NO: 306 - RNA, 17 nt, Homo sapiens
uaagcuuuuauaucaca

SEQ ID NO: 307 - RNA, 17 nt, Homo sapiens
aagcuuuuauaucacag

SEQ ID NO: 308 - RNA, 17 nt, Homo sapiens
gcuuuuauaucacagau

SEQ ID NO: 309 - RNA, 17 nt, Homo sapiens
uuuuauaucacagaugu

SEQ ID NO: 310 - RNA, 17 nt, Homo sapiens
aaauggguuucauguua

SEQ ID NO: 311 - RNA, 17 nt, Homo sapiens
aauggguuucauguuaa

SEQ ID NO: 312 - RNA, 17 nt, Homo sapiens
auggguuucauguuaac

SEQ ID NO: 313 - RNA, 17 nt, Homo sapiens
uuucauguuaacuugga

SEQ ID NO: 314 - RNA, 17 nt, Homo sapiens
uucauguuaacuuggaa

SEQ ID NO: 315 - RNA, 17 nt, Homo sapiens
uguuaacuuggaaaaaa

SEQ ID NO: 316 - RNA, 17 nt, Homo sapiens
gaaacugucuugcacag

SEQ ID NO: 317 - RNA, 17 nt, Homo sapiens
aacugucuugcacaguu

SEQ ID NO: 318 - RNA, 17 nt, Homo sapiens
ugcacaguuaacaaguu

SEQ ID NO: 319 - RNA, 17 nt, Homo sapiens
gcacaguuaacaaguuc

SEQ ID NO: 320 - RNA, 17 nt, Homo sapiens
uaacaaguucuuauaca

SEQ ID NO: 321 - RNA, 17 nt, Homo sapiens
aacaaguucuuauacag

SEQ ID NO: 322 - RNA, 17 nt, Homo sapiens
caaguucuuauacagag

SEQ ID NO: 323 - RNA, 17 nt, Homo sapiens
aaguucuuauacagaga

SEQ ID NO: 324 - RNA, 17 nt, Homo sapiens
guucuuauacagagacg

SEQ ID NO: 325 - RNA, 17 nt, Homo sapiens
agagacguuacuuggau

SEQ ID NO: 326 - RNA, 17 nt, Homo sapiens
gagacguuacuuggauu

SEQ ID NO: 327 - RNA, 17 nt, Homo sapiens
acguuacuuggauuuua

SEQ ID NO: 328 - RNA, 17 nt, Homo sapiens
acuuggauuuuacugcg

SEQ ID NO: 329 - RNA, 17 nt, Homo sapiens
cuuggauuuuacugcgg

SEQ ID NO: 330 - RNA, 17 nt, Homo sapiens
uuggauuuuacugcgga

SEQ ID NO: 331 - RNA, 17 nt, Homo sapiens
uggauuuuacugcggac

SEQ ID NO: 332 - RNA, 17 nt, Homo sapiens
cggacaguuaauaacag

SEQ ID NO: 333 - RNA, 17 nt, Homo sapiens
ggacaguuaauaacaga

SEQ ID NO: 334 - RNA, 17 nt, Homo sapiens
caguuaauaacagaaca

SEQ ID NO: 335 - RNA, 17 nt, Homo sapiens
aaugcacuacaguauua

SEQ ID NO: 336 - RNA, 17 nt, Homo sapiens
acuacaguauuagcaag

SEQ ID NO: 337 - RNA, 17 nt, Homo sapiens
uacaguauuagcaagca

SEQ ID NO: 338 - RNA, 17 nt, Homo sapiens
acaguauuagcaagcaa

SEQ ID NO: 339 - RNA, 17 nt, Homo sapiens
auggccaucacuaagga

SEQ ID NO: 340 - RNA, 17 nt, Homo sapiens
ccaucacuaaggagcac

SEQ ID NO: 341 - RNA, 17 nt, Homo sapiens
ggagcacuccaucacuc

SEQ ID NO: 342 - RNA, 17 nt, Homo sapiens
cacuccaucacucuuaa

SEQ ID NO: 343 - RNA, 17 nt, Homo sapiens
ccaucacucuuaaucuu

SEQ ID NO: 344 - RNA, 17 nt, Homo sapiens
aucacucuuaaucuuac

SEQ ID NO: 345 - RNA, 17 nt, Homo sapiens
ucacucuuaaucuuacc

SEQ ID NO: 346 - RNA, 17 nt, Homo sapiens
cucuuaaucuuaccauc

SEQ ID NO: 347 - RNA, 17 nt, Homo sapiens
cuuaaucuuaccaucau

SEQ ID NO: 348 - RNA, 17 nt, Homo sapiens
uuaaucuuaccaucaug

SEQ ID NO: 349 - RNA, 17 nt, Homo sapiens
cuuaccaucaugaaugu

SEQ ID NO: 350 - RNA, 17 nt, Homo sapiens
augaauguuucccugca

SEQ ID NO: 351 - RNA, 17 nt, Homo sapiens
ugaauguuucccugcaa

SEQ ID NO: 352 - RNA, 17 nt, Homo sapiens
gaauguuucccugcaag

SEQ ID NO: 353 - RNA, 17 nt, Homo sapiens
ugcaagauucaggcacc

SEQ ID NO: 354 - RNA, 17 nt, Homo sapiens
gcaagauucaggcaccu

SEQ ID NO: 355 - RNA, 17 nt, Homo sapiens
aggcaccuaugccugca

SEQ ID NO: 356 - RNA, 17 nt, Homo sapiens
aggaauguauacacagg

SEQ ID NO: 357 - RNA, 17 nt, Homo sapiens
gaauguauacacagggg

SEQ ID NO: 358 - RNA, 17 nt, Homo sapiens
gaagaaauccuccagaa

SEQ ID NO: 359 - RNA, 17 nt, Homo sapiens
gaaauccuccagaagaa

SEQ ID NO: 360 - RNA, 17 nt, Homo sapiens
aaagaaauuacaaucag

SEQ ID NO: 361 - RNA, 17 nt, Homo sapiens
aagaaauuacaaucaga

SEQ ID NO: 362 - RNA, 17 nt, Homo sapiens
auuacaaucagagauca

SEQ ID NO: 363 - RNA, 17 nt, Homo sapiens
ucagagaucaggaagca

SEQ ID NO: 364 - RNA, 17 nt, Homo sapiens
agcaccauaccuccugc

SEQ ID NO: 365 - RNA, 17 nt, Homo sapiens
ccauaccuccugcgaaa

SEQ ID NO: 366 - RNA, 17 nt, Homo sapiens
cgaaaccucagugauca

SEQ ID NO: 367 - RNA, 17 nt, Homo sapiens
ucagugaucacacagug

SEQ ID NO: 368 - RNA, 17 nt, Homo sapiens
guggccaucagcaguuc

SEQ ID NO: 369 - RNA, 17 nt, Homo sapiens
ucagcaguuccaccacu

SEQ ID NO: 370 - RNA, 17 nt, Homo sapiens
cagcaguuccaccacuu

SEQ ID NO: 371 - RNA, 17 nt, Homo sapiens
ccaccacuuuagacugu

SEQ ID NO: 372 - RNA, 17 nt, Homo sapiens
caccacuuuagacuguc

SEQ ID NO: 373 - RNA, 17 nt, Homo sapiens
accacuuuagacuguca

SEQ ID NO: 374 - RNA, 17 nt, Homo sapiens
uagacugucaugcuaau

SEQ ID NO: 375 - RNA, 17 nt, Homo sapiens
gucaugcuaaugguguc

SEQ ID NO: 376 - RNA, 17 nt, Homo sapiens
aaugguguccccgagcc

SEQ ID NO: 377 - RNA, 17 nt, Homo sapiens
ccgagccucagaucacu

SEQ ID NO: 378 - RNA, 17 nt, Homo sapiens
ccucagaucacuugguu

SEQ ID NO: 379 - RNA, 17 nt, Homo sapiens
agaucacuugguuuaaa

SEQ ID NO: 380 - RNA, 17 nt, Homo sapiens
cacuugguuuaaaaaca

SEQ ID NO: 381 - RNA, 17 nt, Homo sapiens
acuugguuuaaaaacaa

SEQ ID NO: 382 - RNA, 17 nt, Homo sapiens
cuugguuuaaaaacaac

SEQ ID NO: 383 - RNA, 17 nt, Homo sapiens
cacaaaauacaacaaga

SEQ ID NO: 384 - RNA, 17 nt, Homo sapiens
ccuggaauuauuuuagg

SEQ ID NO: 385 - RNA, 17 nt, Homo sapiens
cuggaauuauuuuagga

SEQ ID NO: 386 - RNA, 17 nt, Homo sapiens
ggaauuauuuuaggacc

SEQ ID NO: 387 - RNA, 17 nt, Homo sapiens
gaauuauuuuaggacca

SEQ ID NO: 388 - RNA, 17 nt, Homo sapiens
aauuauuuuaggaccag

SEQ ID NO: 389 - RNA, 17 nt, Homo sapiens
auuauuuuaggaccagg

SEQ ID NO: 390 - RNA, 17 nt, Homo sapiens
cacgcuguuuauugaaa

SEQ ID NO: 391 - RNA, 17 nt, Homo sapiens
acgcuguuuauugaaag

SEQ ID NO: 392 - RNA, 17 nt, Homo sapiens
cgcuguuuauugaaaga

SEQ ID NO: 393 - RNA, 17 nt, Homo sapiens
cuguuuauugaaagagu

SEQ ID NO: 394 - RNA, 17 nt, Homo sapiens
gaaagagucacagaaga

SEQ ID NO: 395 - RNA, 17 nt, Homo sapiens
gaaggugucuaucacug

SEQ ID NO: 396 - RNA, 17 nt, Homo sapiens
aggugucuaucacugca

SEQ ID NO: 397 - RNA, 17 nt, Homo sapiens
gugucuaucacugcaaa

SEQ ID NO: 398 - RNA, 17 nt, Homo sapiens
gaagggcucuguggaaa

SEQ ID NO: 399 - RNA, 17 nt, Homo sapiens
uggaaaguucagcauac

SEQ ID NO: 400 - RNA, 17 nt, Homo sapiens
ggaaaguucagcauacc

SEQ ID NO: 401 - RNA, 17 nt, Homo sapiens
uucagcauaccucacug

SEQ ID NO: 402 - RNA, 17 nt, Homo sapiens
gcauaccucacuguuca

SEQ ID NO: 403 - RNA, 17 nt, Homo sapiens
cucacuguucaaggaac

SEQ ID NO: 404 - RNA, 17 nt, Homo sapiens
ucacuguucaaggaacc

SEQ ID NO: 405 - RNA, 17 nt, Homo sapiens
aggaaccucggacaagu

SEQ ID NO: 406 - RNA, 17 nt, Homo sapiens
ggacaagucuaaucugg

SEQ ID NO: 407 - RNA, 17 nt, Homo sapiens
acaagucuaaucuggag

SEQ ID NO: 408 - RNA, 17 nt, Homo sapiens
agucuaaucuggagcug

SEQ ID NO: 409 - RNA, 17 nt, Homo sapiens
gagcugaucacucuaac

SEQ ID NO: 410 - RNA, 17 nt, Homo sapiens
ugaucacucuaacaugc

SEQ ID NO: 411 - RNA, 17 nt, Homo sapiens
aucacucuaacaugcac

SEQ ID NO: 412 - RNA, 17 nt, Homo sapiens
cugcgacucucuucugg

SEQ ID NO: 413 - RNA, 17 nt, Homo sapiens
gcgacucucuucuggcu

SEQ ID NO: 414 - RNA, 17 nt, Homo sapiens
gacucucuucuggcucc

SEQ ID NO: 415 - RNA, 17 nt, Homo sapiens
acucucuucuggcuccu

SEQ ID NO: 416 - RNA, 17 nt, Homo sapiens
uucuggcuccuauuaac

SEQ ID NO: 417 - RNA, 17 nt, Homo sapiens
uggcuccuauuaacccu

SEQ ID NO: 418 - RNA, 17 nt, Homo sapiens
gcuccuauuaacccucc

SEQ ID NO: 419 - RNA, 17 nt, Homo sapiens
cuccuauuaacccuccu

SEQ ID NO: 420 - RNA, 17 nt, Homo sapiens
uuaacccuccuuauccg

SEQ ID NO: 421 - RNA, 17 nt, Homo sapiens
acccuccuuauccgaaa

SEQ ID NO: 422 - RNA, 17 nt, Homo sapiens
cccuccuuauccgaaaa

SEQ ID NO: 423 - RNA, 17 nt, Homo sapiens
cuccuuauccgaaaaau

SEQ ID NO: 424 - RNA, 17 nt, Homo sapiens
gaaaaggucuucuucug

SEQ ID NO: 425 - RNA, 17 nt, Homo sapiens
aaaggucuucuucugaa

SEQ ID NO: 426 - RNA, 17 nt, Homo sapiens
aaggucuucuucugaaa

SEQ ID NO: 427 - RNA, 17 nt, Homo sapiens
ggucuucuucugaaaua

SEQ ID NO: 428 - RNA, 17 nt, Homo sapiens
gucuucuucugaaauaa

SEQ ID NO: 429 - RNA, 17 nt, Homo sapiens
ucugaaauaaagacuga

SEQ ID NO: 430 - RNA, 17 nt, Homo sapiens
gacugacuaccuaucaa

SEQ ID NO: 431 - RNA, 17 nt, Homo sapiens
gacuaccuaucaauuau

SEQ ID NO: 432 - RNA, 17 nt, Homo sapiens
cuaccuaucaauuauaa

SEQ ID NO: 433 - RNA, 17 nt, Homo sapiens
cuaucaauuauaaugga

SEQ ID NO: 434 - RNA, 17 nt, Homo sapiens
uaucaauuauaauggac

SEQ ID NO: 435 - RNA, 17 nt, Homo sapiens
ucaauuauaauggaccc

SEQ ID NO: 436 - RNA, 17 nt, Homo sapiens
gaugaaguuccuuugga

SEQ ID NO: 437 - RNA, 17 nt, Homo sapiens
augaaguuccuuuggau

SEQ ID NO: 438 - RNA, 17 nt, Homo sapiens
aaguuccuuuggaugag

SEQ ID NO: 439 - RNA, 17 nt, Homo sapiens
aguuccuuuggaugagc

SEQ ID NO: 440 - RNA, 17 nt, Homo sapiens
gagcggcucccuuauga

SEQ ID NO: 441 - RNA, 17 nt, Homo sapiens
ggcucccuuaugaugcc

SEQ ID NO: 442 - RNA, 17 nt, Homo sapiens
gcucccuuaugaugcca

SEQ ID NO: 443 - RNA, 17 nt, Homo sapiens
gugggaguuugcccggg

SEQ ID NO: 444 - RNA, 17 nt, Homo sapiens
ugggaguuugcccggga

SEQ ID NO: 445 - RNA, 17 nt, Homo sapiens
gagagacuuaaacuggg

SEQ ID NO: 446 - RNA, 17 nt, Homo sapiens
agagacuuaaacugggc

SEQ ID NO: 447 - RNA, 17 nt, Homo sapiens
gggcaaaucacuuggaa

SEQ ID NO: 448 - RNA, 17 nt, Homo sapiens
aaaucacuuggaagagg

SEQ ID NO: 449 - RNA, 17 nt, Homo sapiens
gaggggcuuuuggaaaa

SEQ ID NO: 450 - RNA, 17 nt, Homo sapiens
aggggcuuuuggaaaag

SEQ ID NO: 451 - RNA, 17 nt, Homo sapiens
ggggcuuuuggaaaagu

SEQ ID NO: 452 - RNA, 17 nt, Homo sapiens
aaagugguucaagcauc

SEQ ID NO: 453 - RNA, 17 nt, Homo sapiens
aagugguucaagcauca

SEQ ID NO: 454 - RNA, 17 nt, Homo sapiens
ucaagcaucagcauuug

SEQ ID NO: 455 - RNA, 17 nt, Homo sapiens
aucagcauuuggcauua

SEQ ID NO: 456 - RNA, 17 nt, Homo sapiens
ucagcauuuggcauuaa

SEQ ID NO: 457 - RNA, 17 nt, Homo sapiens
uuuggcauuaagaaauc

SEQ ID NO: 458 - RNA, 17 nt, Homo sapiens
uuggcauuaagaaauca

SEQ ID NO: 459 - RNA, 17 nt, Homo sapiens
uaagaaaucaccuacgu

SEQ ID NO: 460 - RNA, 17 nt, Homo sapiens
aaucaccuacgugccgg

SEQ ID NO: 461 - RNA, 17 nt, Homo sapiens
cagcgaguacaaagcuc

SEQ ID NO: 462 - RNA, 17 nt, Homo sapiens
acaaagcucugaugacu

SEQ ID NO: 463 - RNA, 17 nt, Homo sapiens
acugagcuaaaaaucuu

SEQ ID NO: 464 - RNA, 17 nt, Homo sapiens
cuaaaaaucuugaccca

SEQ ID NO: 465 - RNA, 17 nt, Homo sapiens
aaaaaucuugacccaca

SEQ ID NO: 466 - RNA, 17 nt, Homo sapiens
acccacauuggccacca

SEQ ID NO: 467 - RNA, 17 nt, Homo sapiens
gccaccaucugaacgug

SEQ ID NO: 468 - RNA, 17 nt, Homo sapiens
aacgugguuaaccugcu

SEQ ID NO: 469 - RNA, 17 nt, Homo sapiens
acgugguuaaccugcug

SEQ ID NO: 470 - RNA, 17 nt, Homo sapiens
gagggccucugauggug

SEQ ID NO: 471 - RNA, 17 nt, Homo sapiens
auggugauuguugaaua

SEQ ID NO: 472 - RNA, 17 nt, Homo sapiens
gugauuguugaauacug

SEQ ID NO: 473 - RNA, 17 nt, Homo sapiens
uguugaauacugcaaau

SEQ ID NO: 474 - RNA, 17 nt, Homo sapiens
cugcaaauauggaaauc

SEQ ID NO: 475 - RNA, 17 nt, Homo sapiens
auggaaaucucuccaac

SEQ ID NO: 476 - RNA, 17 nt, Homo sapiens
ggaaaucucuccaacua

SEQ ID NO: 477 - RNA, 17 nt, Homo sapiens
aaaucucuccaacuacc

SEQ ID NO: 478 - RNA, 17 nt, Homo sapiens
cuccaacuaccucaaga

SEQ ID NO: 479 - RNA, 17 nt, Homo sapiens
aacuaccucaagagcaa

SEQ ID NO: 480 - RNA, 17 nt, Homo sapiens
acgugacuuauuuuuuc

SEQ ID NO: 481 - RNA, 17 nt, Homo sapiens
cgugacuuauuuuuucu

SEQ ID NO: 482 - RNA, 17 nt, Homo sapiens
ugacuuauuuuuucuca

SEQ ID NO: 483 - RNA, 17 nt, Homo sapiens
gacuuauuuuuucucaa

SEQ ID NO: 484 - RNA, 17 nt, Homo sapiens
acuuauuuuuucucaac

SEQ ID NO: 485 - RNA, 17 nt, Homo sapiens
cuuauuuuuucucaaca

SEQ ID NO: 486 - RNA, 17 nt, Homo sapiens
uuauuuuuucucaacaa

SEQ ID NO: 487 - RNA, 17 nt, Homo sapiens
uauuuuuucucaacaag

SEQ ID NO: 488 - RNA, 17 nt, Homo sapiens
uuuuuucucaacaagga

SEQ ID NO: 489 - RNA, 17 nt, Homo sapiens
gcagcacuacacaugga

SEQ ID NO: 490 - RNA, 17 nt, Homo sapiens
uggagccuaagaaagaa

SEQ ID NO: 491 - RNA, 17 nt, Homo sapiens
ccaagacuagauagcgu

SEQ ID NO: 492 - RNA, 17 nt, Homo sapiens
gacuagauagcgucacc

SEQ ID NO: 493 - RNA, 17 nt, Homo sapiens
gauagcgucaccagcag

SEQ ID NO: 494 - RNA, 17 nt, Homo sapiens
cgaaagcuuugcgagcu

SEQ ID NO: 495 - RNA, 17 nt, Homo sapiens
gaaagcuuugcgagcuc

SEQ ID NO: 496 - RNA, 17 nt, Homo sapiens
ugcgagcuccggcuuuc

SEQ ID NO: 497 - RNA, 17 nt, Homo sapiens
cuccggcuuucaggaag

SEQ ID NO: 498 - RNA, 17 nt, Homo sapiens
uccggcuuucaggaaga

SEQ ID NO: 499 - RNA, 17 nt, Homo sapiens
ccggcuuucaggaagau

SEQ ID NO: 500 - RNA, 17 nt, Homo sapiens
aggaagauaaaagucug

SEQ ID NO: 501 - RNA, 17 nt, Homo sapiens
auaaaagucugagugau

SEQ ID NO: 502 - RNA, 17 nt, Homo sapiens
agugauguugaggaaga

SEQ ID NO: 503 - RNA, 17 nt, Homo sapiens
aggaggauucugacggu

SEQ ID NO: 504 - RNA, 17 nt, Homo sapiens
ggaggauucugacgguu

SEQ ID NO: 505 - RNA, 17 nt, Homo sapiens
cugacgguuucuacaag

SEQ ID NO: 506 - RNA, 17 nt, Homo sapiens
ugacgguuucuacaagg

SEQ ID NO: 507 - RNA, 17 nt, Homo sapiens
gacgguuucuacaagga

SEQ ID NO: 508 - RNA, 17 nt, Homo sapiens
cgguuucuacaaggagc

SEQ ID NO: 509 - RNA, 17 nt, Homo sapiens
gagcccaucacuaugga

SEQ ID NO: 510 - RNA, 17 nt, Homo sapiens
ccaucacuauggaagau

SEQ ID NO: 511 - RNA, 17 nt, Homo sapiens
uggaagaucugauuucu

SEQ ID NO: 512 - RNA, 17 nt, Homo sapiens
gaucugauuucuuacag

SEQ ID NO: 513 - RNA, 17 nt, Homo sapiens
aucugauuucuuacagu

SEQ ID NO: 514 - RNA, 17 nt, Homo sapiens
ucugauuucuuacaguu

SEQ ID NO: 515 - RNA, 17 nt, Homo sapiens
ugauuucuuacaguuuu

SEQ ID NO: 516 - RNA, 17 nt, Homo sapiens
gauuucuuacaguuuuc

SEQ ID NO: 517 - RNA, 17 nt, Homo sapiens
cuuacaguuuucaagug

SEQ ID NO: 518 - RNA, 17 nt, Homo sapiens
uuacaguuuucaagugg

SEQ ID NO: 519 - RNA, 17 nt, Homo sapiens
uacaguuuucaaguggc

SEQ ID NO: 520 - RNA, 17 nt, Homo sapiens
acaguuuucaaguggcc

SEQ ID NO: 521 - RNA, 17 nt, Homo sapiens
cauggaguuccugucuu

SEQ ID NO: 522 - RNA, 17 nt, Homo sapiens
auggaguuccugucuuc

SEQ ID NO: 523 - RNA, 17 nt, Homo sapiens
guuccugucuuccagaa

SEQ ID NO: 524 - RNA, 17 nt, Homo sapiens
uccugucuuccagaaag

SEQ ID NO: 525 - RNA, 17 nt, Homo sapiens
ccugucuuccagaaagu

SEQ ID NO: 526 - RNA, 17 nt, Homo sapiens
aagugcauucaucggga

SEQ ID NO: 527 - RNA, 17 nt, Homo sapiens
agugcauucaucgggac

SEQ ID NO: 528 - RNA, 17 nt, Homo sapiens
gcauucaucgggaccug

SEQ ID NO: 529 - RNA, 17 nt, Homo sapiens
agaaacauucuuuuauc

SEQ ID NO: 530 - RNA, 17 nt, Homo sapiens
gaaacauucuuuuaucu

SEQ ID NO: 531 - RNA, 17 nt, Homo sapiens
aacauucuuuuaucuga

SEQ ID NO: 532 - RNA, 17 nt, Homo sapiens
acauucuuuuaucugag

SEQ ID NO: 533 - RNA, 17 nt, Homo sapiens
cauucuuuuaucugaga

SEQ ID NO: 534 - RNA, 17 nt, Homo sapiens
auucuuuuaucugagaa

SEQ ID NO: 535 - RNA, 17 nt, Homo sapiens
ucuuuuaucugagaaca

SEQ ID NO: 536 - RNA, 17 nt, Homo sapiens
gugaagauuugugauuu

SEQ ID NO: 537 - RNA, 17 nt, Homo sapiens
ugaagauuugugauuuu

SEQ ID NO: 538 - RNA, 17 nt, Homo sapiens
uuugugauuuuggccuu

SEQ ID NO: 539 - RNA, 17 nt, Homo sapiens
uugugauuuuggccuug

SEQ ID NO: 540 - RNA, 17 nt, Homo sapiens
ugugauuuuggccuugc

SEQ ID NO: 541 - RNA, 17 nt, Homo sapiens
uuuggccuugcccggga

SEQ ID NO: 542 - RNA, 17 nt, Homo sapiens
cccgggauauuuauaag

SEQ ID NO: 543 - RNA, 17 nt, Homo sapiens
cgggauauuuauaagaa

SEQ ID NO: 544 - RNA, 17 nt, Homo sapiens
gggauauuuauaagaac

SEQ ID NO: 545 - RNA, 17 nt, Homo sapiens
ggauauuuauaagaacc

SEQ ID NO: 546 - RNA, 17 nt, Homo sapiens
auauuuauaagaacccc

SEQ ID NO: 547 - RNA, 17 nt, Homo sapiens
accccgauuaugugaga

SEQ ID NO: 548 - RNA, 17 nt, Homo sapiens
ccccgauuaugugagaa

SEQ ID NO: 549 - RNA, 17 nt, Homo sapiens
aaggagauacucgacuu

SEQ ID NO: 550 - RNA, 17 nt, Homo sapiens
gagauacucgacuuccu

SEQ ID NO: 551 - RNA, 17 nt, Homo sapiens
acucgacuuccucugaa

SEQ ID NO: 552 - RNA, 17 nt, Homo sapiens
cucgacuuccucugaaa

SEQ ID NO: 553 - RNA, 17 nt, Homo sapiens
gacuuccucugaaaugg

SEQ ID NO: 554 - RNA, 17 nt, Homo sapiens
ggauggcucccgaaucu

SEQ ID NO: 555 - RNA, 17 nt, Homo sapiens
ucccgaaucuaucuuug

SEQ ID NO: 556 - RNA, 17 nt, Homo sapiens
ccgaaucuaucuuugac

SEQ ID NO: 557 - RNA, 17 nt, Homo sapiens
gaaucuaucuuugacaa

SEQ ID NO: 558 - RNA, 17 nt, Homo sapiens
aucuaucuuugacaaaa

SEQ ID NO: 559 - RNA, 17 nt, Homo sapiens
ucuaucuuugacaaaau

SEQ ID NO: 560 - RNA, 17 nt, Homo sapiens
gacaaaaucuacagcac

SEQ ID NO: 561 - RNA, 17 nt, Homo sapiens
caaaaucuacagcacca

SEQ ID NO: 562 - RNA, 17 nt, Homo sapiens
cguguggucuuacggag

SEQ ID NO: 563 - RNA, 17 nt, Homo sapiens
uguggucuuacggagua

SEQ ID NO: 564 - RNA, 17 nt, Homo sapiens
guggucuuacggaguau

SEQ ID NO: 565 - RNA, 17 nt, Homo sapiens
uacggaguauugcugug

SEQ ID NO: 566 - RNA, 17 nt, Homo sapiens
cggaguauugcuguggg

SEQ ID NO: 567 - RNA, 17 nt, Homo sapiens
ugggaaaucuucuccuu

SEQ ID NO: 568 - RNA, 17 nt, Homo sapiens
ggaaaucuucuccuuag

SEQ ID NO: 569 - RNA, 17 nt, Homo sapiens
gaaaucuucuccuuagg

SEQ ID NO: 570 - RNA, 17 nt, Homo sapiens
aaucuucuccuuaggug

SEQ ID NO: 571 - RNA, 17 nt, Homo sapiens
cuucuccuuaggugggu

SEQ ID NO: 572 - RNA, 17 nt, Homo sapiens
uucuccuuagguggguc

SEQ ID NO: 573 - RNA, 17 nt, Homo sapiens
aggugggucuccauacc

SEQ ID NO: 574 - RNA, 17 nt, Homo sapiens
gugggucuccauaccca

SEQ ID NO: 575 - RNA, 17 nt, Homo sapiens
gucuccauacccaggag

SEQ ID NO: 576 - RNA, 17 nt, Homo sapiens
ccaggaguacaaaugga

SEQ ID NO: 577 - RNA, 17 nt, Homo sapiens
ugaggacuuuugcaguc

SEQ ID NO: 578 - RNA, 17 nt, Homo sapiens
gaggacuuuugcagucg

SEQ ID NO: 579 - RNA, 17 nt, Homo sapiens
aggacuuuugcagucgc

SEQ ID NO: 580 - RNA, 17 nt, Homo sapiens
uuugcagucgccugagg

SEQ ID NO: 581 - RNA, 17 nt, Homo sapiens
ugagagcuccugaguac

SEQ ID NO: 582 - RNA, 17 nt, Homo sapiens
uccugaguacucuacuc

SEQ ID NO: 583 - RNA, 17 nt, Homo sapiens
ugaguacucuacuccug

SEQ ID NO: 584 - RNA, 17 nt, Homo sapiens
aguacucuacuccugaa

SEQ ID NO: 585 - RNA, 17 nt, Homo sapiens
acucuacuccugaaauc

SEQ ID NO: 586 - RNA, 17 nt, Homo sapiens
ccugaaaucuaucagau

SEQ ID NO: 587 - RNA, 17 nt, Homo sapiens
ugaaaucuaucagauca

SEQ ID NO: 588 - RNA, 17 nt, Homo sapiens
aaaucuaucagaucaug

SEQ ID NO: 589 - RNA, 17 nt, Homo sapiens
uaucagaucaugcugga

SEQ ID NO: 590 - RNA, 17 nt, Homo sapiens
gccaagauuugcagaac

SEQ ID NO: 591 - RNA, 17 nt, Homo sapiens
ccaagauuugcagaacu

SEQ ID NO: 592 - RNA, 17 nt, Homo sapiens
gcagaacuuguggaaaa

SEQ ID NO: 593 - RNA, 17 nt, Homo sapiens
gaaaaacuaggugauuu

SEQ ID NO: 594 - RNA, 17 nt, Homo sapiens
uaggugauuugcuucaa

SEQ ID NO: 595 - RNA, 17 nt, Homo sapiens
aggugauuugcuucaag

SEQ ID NO: 596 - RNA, 17 nt, Homo sapiens
gauuugcuucaagcaaa

SEQ ID NO: 597 - RNA, 17 nt, Homo sapiens
auuugcuucaagcaaau

SEQ ID NO: 598 - RNA, 17 nt, Homo sapiens
gcaaauguacaacagga

SEQ ID NO: 599 - RNA, 17 nt, Homo sapiens
aggaugguaaagacuac

SEQ ID NO: 600 - RNA, 17 nt, Homo sapiens
uaaagacuacaucccaa

SEQ ID NO: 601 - RNA, 17 nt, Homo sapiens
gacuacaucccaaucaa

SEQ ID NO: 602 - RNA, 17 nt, Homo sapiens
aucccaaucaaugccau

SEQ ID NO: 603 - RNA, 17 nt, Homo sapiens
aaugccauacugacagg

SEQ ID NO: 604 - RNA, 17 nt, Homo sapiens
caggaaauaguggguuu

SEQ ID NO: 605 - RNA, 17 nt, Homo sapiens
uaguggguuuacauacu

SEQ ID NO: 606 - RNA, 17 nt, Homo sapiens
aguggguuuacauacuc

SEQ ID NO: 607 - RNA, 17 nt, Homo sapiens
guggguuuacauacuca

SEQ ID NO: 608 - RNA, 17 nt, Homo sapiens
guuuacauacucaacuc

SEQ ID NO: 609 - RNA, 17 nt, Homo sapiens
uacauacucaacuccug

SEQ ID NO: 610 - RNA, 17 nt, Homo sapiens
acucaacuccugccuuc

SEQ ID NO: 611 - RNA, 17 nt, Homo sapiens
uccugccuucucugagg

SEQ ID NO: 612 - RNA, 17 nt, Homo sapiens
ccugccuucucugagga

SEQ ID NO: 613 - RNA, 17 nt, Homo sapiens
ugccuucucugaggacu

SEQ ID NO: 614 - RNA, 17 nt, Homo sapiens
ugaggacuucuucaagg

SEQ ID NO: 615 - RNA, 17 nt, Homo sapiens
gaggacuucuucaagga

SEQ ID NO: 616 - RNA, 17 nt, Homo sapiens
ggacuucuucaaggaaa

SEQ ID NO: 617 - RNA, 17 nt, Homo sapiens
gacuucuucaaggaaag

SEQ ID NO: 618 - RNA, 17 nt, Homo sapiens
aggaaaguauuucagcu

SEQ ID NO: 619 - RNA, 17 nt, Homo sapiens
gaaaguauuucagcucc

SEQ ID NO: 620 - RNA, 17 nt, Homo sapiens
aaaguauuucagcuccg

SEQ ID NO: 621 - RNA, 17 nt, Homo sapiens
aaguauuucagcuccga

SEQ ID NO: 622 - RNA, 17 nt, Homo sapiens
uuucagcuccgaaguuu

SEQ ID NO: 623 - RNA, 17 nt, Homo sapiens
uccgaaguuuaauucag

SEQ ID NO: 624 - RNA, 17 nt, Homo sapiens
ccgaaguuuaauucagg

SEQ ID NO: 625 - RNA, 17 nt, Homo sapiens
cgaaguuuaauucagga

SEQ ID NO: 626 - RNA, 17 nt, Homo sapiens
aguuuaauucaggaagc

SEQ ID NO: 627 - RNA, 17 nt, Homo sapiens
guuuaauucaggaagcu

SEQ ID NO: 628 - RNA, 17 nt, Homo sapiens
aggaagcucugaugaug

SEQ ID NO: 629 - RNA, 17 nt, Homo sapiens
gaugaugucagauaugu

SEQ ID NO: 630 - RNA, 17 nt, Homo sapiens
ugucagauauguaaaug

SEQ ID NO: 631 - RNA, 17 nt, Homo sapiens
agauauguaaaugcuuu

SEQ ID NO: 632 - RNA, 17 nt, Homo sapiens
uaaaugcuuucaaguuc

SEQ ID NO: 633 - RNA, 17 nt, Homo sapiens
aaaugcuuucaaguuca

SEQ ID NO: 634 - RNA, 17 nt, Homo sapiens
aaugcuuucaaguucau

SEQ ID NO: 635 - RNA, 17 nt, Homo sapiens
uuucaaguucaugagcc

SEQ ID NO: 636 - RNA, 17 nt, Homo sapiens
uucaaguucaugagccu

SEQ ID NO: 637 - RNA, 17 nt, Homo sapiens
gaaagaaucaaaaccuu

SEQ ID NO: 638 - RNA, 17 nt, Homo sapiens
caaaaccuuugaagaac

SEQ ID NO: 639 - RNA, 17 nt, Homo sapiens
aaaaccuuugaagaacu

SEQ ID NO: 640 - RNA, 17 nt, Homo sapiens
gaagaacuuuuaccgaa

SEQ ID NO: 641 - RNA, 17 nt, Homo sapiens
aagaacuuuuaccgaau

SEQ ID NO: 642 - RNA, 17 nt, Homo sapiens
agaacuuuuaccgaaug

SEQ ID NO: 643 - RNA, 17 nt, Homo sapiens
gaacuuuuaccgaaugc

SEQ ID NO: 644 - RNA, 17 nt, Homo sapiens
ugccaccuccauguuug

SEQ ID NO: 645 - RNA, 17 nt, Homo sapiens
cuccauguuugaugacu

SEQ ID NO: 646 - RNA, 17 nt, Homo sapiens
uccauguuugaugacua

SEQ ID NO: 647 - RNA, 17 nt, Homo sapiens
ugaugacuaccagggcg

SEQ ID NO: 648 - RNA, 17 nt, Homo sapiens
gcagcacucuguuggcc

SEQ ID NO: 649 - RNA, 17 nt, Homo sapiens
cacucuguuggccucuc

SEQ ID NO: 650 - RNA, 17 nt, Homo sapiens
guuggccucucccaugc

SEQ ID NO: 651 - RNA, 17 nt, Homo sapiens
uggccucucccaugcug

SEQ ID NO: 652 - RNA, 17 nt, Homo sapiens
gaagcgcuucaccugga

SEQ ID NO: 653 - RNA, 17 nt, Homo sapiens
aagcgcuucaccuggac

SEQ ID NO: 654 - RNA, 17 nt, Homo sapiens
caaggccucgcucaaga

SEQ ID NO: 655 - RNA, 17 nt, Homo sapiens
gccucgcucaagauuga

SEQ ID NO: 656 - RNA, 17 nt, Homo sapiens
cucaagauugacuugag

SEQ ID NO: 657 - RNA, 17 nt, Homo sapiens
gauugacuugagaguaa

SEQ ID NO: 658 - RNA, 17 nt, Homo sapiens
uugagaguaaccaguaa

SEQ ID NO: 659 - RNA, 17 nt, Homo sapiens
uaaccaguaaaaguaag

SEQ ID NO: 660 - RNA, 17 nt, Homo sapiens
guaaaaguaaggagucg

SEQ ID NO: 661 - RNA, 17 nt, Homo sapiens
uaaggagucggggcugu

SEQ ID NO: 662 - RNA, 17 nt, Homo sapiens
ggggcugucugauguca

SEQ ID NO: 663 - RNA, 17 nt, Homo sapiens
ucugaugucagcaggcc

SEQ ID NO: 664 - RNA, 17 nt, Homo sapiens
ggcccaguuucugccau

SEQ ID NO: 665 - RNA, 17 nt, Homo sapiens
gcccaguuucugccauu

SEQ ID NO: 666 - RNA, 17 nt, Homo sapiens
cccaguuucugccauuc

SEQ ID NO: 667 - RNA, 17 nt, Homo sapiens
ucugccauuccagcugu

SEQ ID NO: 668 - RNA, 17 nt, Homo sapiens
cugccauuccagcugug

SEQ ID NO: 669 - RNA, 17 nt, Homo sapiens
gggcacgucagcgaagg

SEQ ID NO: 670 - RNA, 17 nt, Homo sapiens
gcgcagguucaccuacg

SEQ ID NO: 671 - RNA, 17 nt, Homo sapiens
cgcagguucaccuacga

SEQ ID NO: 672 - RNA, 17 nt, Homo sapiens
guucaccuacgaccacg

SEQ ID NO: 673 - RNA, 17 nt, Homo sapiens
aggaaaaucgcgugcug

SEQ ID NO: 674 - RNA, 17 nt, Homo sapiens
gugcugcuccccgcccc

SEQ ID NO: 675 - RNA, 17 nt, Homo sapiens
cccagacuacaacucgg

SEQ ID NO: 676 - RNA, 17 nt, Homo sapiens
cuacaacucgguggucc

SEQ ID NO: 677 - RNA, 17 nt, Homo sapiens
ucggugguccuguacuc

SEQ ID NO: 678 - RNA, 17 nt, Homo sapiens
gguccuguacuccaccc

SEQ ID NO: 679 - RNA, 17 nt, Homo sapiens
ccuguacuccaccccac

SEQ ID NO: 680 - RNA, 17 nt, Homo sapiens
ccacccaucuagaguuu

SEQ ID NO: 681 - RNA, 17 nt, Homo sapiens
acccaucuagaguuuga

SEQ ID NO: 682 - RNA, 17 nt, Homo sapiens
ucuagaguuugacacga

SEQ ID NO: 683 - RNA, 17 nt, Homo sapiens
cuagaguuugacacgaa

SEQ ID NO: 684 - RNA, 17 nt, Homo sapiens
cgaagccuuauuucuag

SEQ ID NO: 685 - RNA, 17 nt, Homo sapiens
gaagccuuauuucuaga

SEQ ID NO: 686 - RNA, 17 nt, Homo sapiens
agccuuauuucuagaag

SEQ ID NO: 687 - RNA, 17 nt, Homo sapiens
gccuuauuucuagaagc

SEQ ID NO: 688 - RNA, 17 nt, Homo sapiens
ccuuauuucuagaagca

SEQ ID NO: 689 - RNA, 17 nt, Homo sapiens
uuauuucuagaagcaca

SEQ ID NO: 690 - RNA, 17 nt, Homo sapiens
acauguguauuuauacc

SEQ ID NO: 691 - RNA, 17 nt, Homo sapiens
auguguauuuauacccc

SEQ ID NO: 692 - RNA, 17 nt, Homo sapiens
uguguauuuauaccccc

SEQ ID NO: 693 - RNA, 17 nt, Homo sapiens
guguauuuauaccccca

SEQ ID NO: 694 - RNA, 17 nt, Homo sapiens
guauuuauacccccagg

SEQ ID NO: 695 - RNA, 17 nt, Homo sapiens
aggaaacuagcuuuugc

SEQ ID NO: 696 - RNA, 17 nt, Homo sapiens
aacuagcuuuugccagu

SEQ ID NO: 697 - RNA, 17 nt, Homo sapiens
acuagcuuuugccagua

SEQ ID NO: 698 - RNA, 17 nt, Homo sapiens
cuagcuuuugccaguau

SEQ ID NO: 699 - RNA, 17 nt, Homo sapiens
uugccaguauuaugcau

SEQ ID NO: 700 - RNA, 17 nt, Homo sapiens
gccaguauuaugcauau

SEQ ID NO: 701 - RNA, 17 nt, Homo sapiens
ccaguauuaugcauaua

SEQ ID NO: 702 - RNA, 17 nt, Homo sapiens
uuaugcauauauaaguu

SEQ ID NO: 703 - RNA, 17 nt, Homo sapiens
augcauauauaaguuua

SEQ ID NO: 704 - RNA, 17 nt, Homo sapiens
gcauauauaaguuuaca

SEQ ID NO: 705 - RNA, 17 nt, Homo sapiens
auauaaguuuacaccuu

SEQ ID NO: 706 - RNA, 17 nt, Homo sapiens
uauaaguuuacaccuuu

SEQ ID NO: 707 - RNA, 17 nt, Homo sapiens
auaaguuuacaccuuua

SEQ ID NO: 708 - RNA, 17 nt, Homo sapiens
uuacaccuuuaucuuuc

SEQ ID NO: 709 - RNA, 17 nt, Homo sapiens
uacaccuuuaucuuucc

SEQ ID NO: 710 - RNA, 17 nt, Homo sapiens
acaccuuuaucuuucca

SEQ ID NO: 711 - RNA, 17 nt, Homo sapiens
accuuuaucuuuccaug

SEQ ID NO: 712 - RNA, 17 nt, Homo sapiens
cuuuaucuuuccauggg

SEQ ID NO: 713 - RNA, 17 nt, Homo sapiens
uuuaucuuuccauggga

SEQ ID NO: 714 - RNA, 17 nt, Homo sapiens
uuaucuuuccaugggag

SEQ ID NO: 715 - RNA, 17 nt, Homo sapiens
cagcugcuuuuugugau

SEQ ID NO: 716 - RNA, 17 nt, Homo sapiens
agcugcuuuuugugauu

SEQ ID NO: 717 - RNA, 17 nt, Homo sapiens
gcugcuuuuugugauuu

SEQ ID NO: 718 - RNA, 17 nt, Homo sapiens
cugcuuuuugugauuuu

SEQ ID NO: 719 - RNA, 17 nt, Homo sapiens
uuugugauuuuuuuaau

SEQ ID NO: 720 - RNA, 17 nt, Homo sapiens
uugugauuuuuuuaaua

SEQ ID NO: 721 - RNA, 17 nt, Homo sapiens
ugugauuuuuuuaauag

SEQ ID NO: 722 - RNA, 17 nt, Homo sapiens
gugauuuuuuuaauagu

SEQ ID NO: 723 - RNA, 17 nt, Homo sapiens
ugauuuuuuuaauagug

SEQ ID NO: 724 - RNA, 17 nt, Homo sapiens
gauuuuuuuaauagugc

SEQ ID NO: 725 - RNA, 17 nt, Homo sapiens
auuuuuuuaauagugcu

SEQ ID NO: 726 - RNA, 17 nt, Homo sapiens
uuuuuaauagugcuuuu

SEQ ID NO: 727 - RNA, 17 nt, Homo sapiens
auagugcuuuuuuuuuu

SEQ ID NO: 728 - RNA, 17 nt, Homo sapiens
uagugcuuuuuuuuuuu

SEQ ID NO: 729 - RNA, 17 nt, Homo sapiens
agugcuuuuuuuuuuug

SEQ ID NO: 730 - RNA, 17 nt, Homo sapiens
gugcuuuuuuuuuuuga

SEQ ID NO: 731 - RNA, 17 nt, Homo sapiens
ugcuuuuuuuuuuugac

SEQ ID NO: 732 - RNA, 17 nt, Homo sapiens
gcuuuuuuuuuuugacu

SEQ ID NO: 733 - RNA, 17 nt, Homo sapiens
cuuuuuuuuuuugacua

SEQ ID NO: 734 - RNA, 17 nt, Homo sapiens
uuuuuuuuuuugacuaa

SEQ ID NO: 735 - RNA, 17 nt, Homo sapiens
uuuuuuuuuugacuaac

SEQ ID NO: 736 - RNA, 17 nt, Homo sapiens
uuuuuuuuugacuaaca

SEQ ID NO: 737 - RNA, 17 nt, Homo sapiens
uuuugacuaacaagaau

SEQ ID NO: 738 - RNA, 17 nt, Homo sapiens
aagaauguaacuccaga

SEQ ID NO: 739 - RNA, 17 nt, Homo sapiens
auguaacuccagauaga

SEQ ID NO: 740 - RNA, 17 nt, Homo sapiens
cuccagauagagaaaua

SEQ ID NO: 741 - RNA, 17 nt, Homo sapiens
agagaaauagugacaag

SEQ ID NO: 742 - RNA, 17 nt, Homo sapiens
agaacacuacugcuaaa

SEQ ID NO: 743 - RNA, 17 nt, Homo sapiens
cuacugcuaaauccuca

SEQ ID NO: 744 - RNA, 17 nt, Homo sapiens
ugcuaaauccucauguu

SEQ ID NO: 745 - RNA, 17 nt, Homo sapiens
uaaauccucauguuacu

SEQ ID NO: 746 - RNA, 17 nt, Homo sapiens
ccucauguuacucagug

SEQ ID NO: 747 - RNA, 17 nt, Homo sapiens
cucauguuacucagugu

SEQ ID NO: 748 - RNA, 17 nt, Homo sapiens
auguuacucaguguuag

SEQ ID NO: 749 - RNA, 17 nt, Homo sapiens
cucaguguuagagaaau

SEQ ID NO: 750 - RNA, 17 nt, Homo sapiens
ucaguguuagagaaauc

SEQ ID NO: 751 - RNA, 17 nt, Homo sapiens
agagaaauccuuccuaa

SEQ ID NO: 752 - RNA, 17 nt, Homo sapiens
gaaauccuuccuaaacc

SEQ ID NO: 753 - RNA, 17 nt, Homo sapiens
aaauccuuccuaaaccc

SEQ ID NO: 754 - RNA, 17 nt, Homo sapiens
uccuuccuaaacccaau

SEQ ID NO: 755 - RNA, 17 nt, Homo sapiens
caaugacuucccugcuc

SEQ ID NO: 756 - RNA, 17 nt, Homo sapiens
aaugacuucccugcucc

SEQ ID NO: 757 - RNA, 17 nt, Homo sapiens
ucccugcuccaaccccc

SEQ ID NO: 758 - RNA, 17 nt, Homo sapiens
cgccaccucagggcacg

SEQ ID NO: 759 - RNA, 17 nt, Homo sapiens
ggaccaguuugauugag

SEQ ID NO: 760 - RNA, 17 nt, Homo sapiens
gaccaguuugauugagg

SEQ ID NO: 761 - RNA, 17 nt, Homo sapiens
aguuugauugaggagcu

SEQ ID NO: 762 - RNA, 17 nt, Homo sapiens
gcacugaucacccaaug

SEQ ID NO: 763 - RNA, 17 nt, Homo sapiens
caaugcaucacguaccc

SEQ ID NO: 764 - RNA, 17 nt, Homo sapiens
caucacguaccccacug

SEQ ID NO: 765 - RNA, 17 nt, Homo sapiens
aagcccguuagccccag

SEQ ID NO: 766 - RNA, 17 nt, Homo sapiens
agcccguuagccccagg

SEQ ID NO: 767 - RNA, 17 nt, Homo sapiens
caggggaucacuggcug

SEQ ID NO: 768 - RNA, 17 nt, Homo sapiens
agcaacaucucgggagu

SEQ ID NO: 769 - RNA, 17 nt, Homo sapiens
caacaucucgggagucc

SEQ ID NO: 770 - RNA, 17 nt, Homo sapiens
ucgggaguccucuagca

SEQ ID NO: 771 - RNA, 17 nt, Homo sapiens
ggaguccucuagcaggc

SEQ ID NO: 772 - RNA, 17 nt, Homo sapiens
aguccucuagcaggccu

SEQ ID NO: 773 - RNA, 17 nt, Homo sapiens
gcaggccuaagacaugu

SEQ ID NO: 774 - RNA, 17 nt, Homo sapiens
gaaagaauuugagacgc

SEQ ID NO: 775 - RNA, 17 nt, Homo sapiens
aaagaauuugagacgca

SEQ ID NO: 776 - RNA, 17 nt, Homo sapiens
acggggcucagcaaugc

SEQ ID NO: 777 - RNA, 17 nt, Homo sapiens
aaugccauuucaguggc

SEQ ID NO: 778 - RNA, 17 nt, Homo sapiens
augccauuucaguggcu

SEQ ID NO: 779 - RNA, 17 nt, Homo sapiens
ugccauuucaguggcuu

SEQ ID NO: 780 - RNA, 17 nt, Homo sapiens
caguggcuucccagcuc

SEQ ID NO: 781 - RNA, 17 nt, Homo sapiens
aguggcuucccagcucu

SEQ ID NO: 782 - RNA, 17 nt, Homo sapiens
ucccagcucugacccuu

SEQ ID NO: 783 - RNA, 17 nt, Homo sapiens
cugacccuucuacauuu

SEQ ID NO: 784 - RNA, 17 nt, Homo sapiens
ugacccuucuacauuug

SEQ ID NO: 785 - RNA, 17 nt, Homo sapiens
acccuucuacauuugag

SEQ ID NO: 786 - RNA, 17 nt, Homo sapiens
uucuacauuugagggcc

SEQ ID NO: 787 - RNA, 17 nt, Homo sapiens
ucuacauuugagggccc

SEQ ID NO: 788 - RNA, 17 nt, Homo sapiens
ggggacauuuucuggau

SEQ ID NO: 789 - RNA, 17 nt, Homo sapiens
gggacauuuucuggauu

SEQ ID NO: 790 - RNA, 17 nt, Homo sapiens
ggacauuuucuggauuc

SEQ ID NO: 791 - RNA, 17 nt, Homo sapiens
gacauuuucuggauucu

SEQ ID NO: 792 - RNA, 17 nt, Homo sapiens
uucuggauucugggagg

SEQ ID NO: 793 - RNA, 17 nt, Homo sapiens
ucuggauucugggaggc

SEQ ID NO: 794 - RNA, 17 nt, Homo sapiens
ggacaaauaucuuuuuu

SEQ ID NO: 795 - RNA, 17 nt, Homo sapiens
acaaauaucuuuuuugg

SEQ ID NO: 796 - RNA, 17 nt, Homo sapiens
aaauaucuuuuuuggaa

SEQ ID NO: 797 - RNA, 17 nt, Homo sapiens
aauaucuuuuuuggaac

SEQ ID NO: 798 - RNA, 17 nt, Homo sapiens
auaucuuuuuuggaacu

SEQ ID NO: 799 - RNA, 17 nt, Homo sapiens
uaucuuuuuuggaacua

SEQ ID NO: 800 - RNA, 17 nt, Homo sapiens
aucuuuuuuggaacuaa

SEQ ID NO: 801 - RNA, 17 nt, Homo sapiens
uuggaacuaaagcaaau

SEQ ID NO: 802 - RNA, 17 nt, Homo sapiens
aagcaaauuuuagaccu

SEQ ID NO: 803 - RNA, 17 nt, Homo sapiens
agcaaauuuuagaccuu

SEQ ID NO: 804 - RNA, 17 nt, Homo sapiens
gcaaauuuuagaccuuu

SEQ ID NO: 805 - RNA, 17 nt, Homo sapiens
caaauuuuagaccuuua

SEQ ID NO: 806 - RNA, 17 nt, Homo sapiens
uuagaccuuuaccuaug

SEQ ID NO: 807 - RNA, 17 nt, Homo sapiens
uagaccuuuaccuaugg

SEQ ID NO: 808 - RNA, 17 nt, Homo sapiens
agaccuuuaccuaugga

SEQ ID NO: 809 - RNA, 17 nt, Homo sapiens
cuuuaccuauggaagug

SEQ ID NO: 810 - RNA, 17 nt, Homo sapiens
gaagugguucuaugucc

SEQ ID NO: 811 - RNA, 17 nt, Homo sapiens
aagugguucuaugucca

SEQ ID NO: 812 - RNA, 17 nt, Homo sapiens
gugguucuauguccauu

SEQ ID NO: 813 - RNA, 17 nt, Homo sapiens
uucuauguccauucuca

SEQ ID NO: 814 - RNA, 17 nt, Homo sapiens
auguccauucucauucg

SEQ ID NO: 815 - RNA, 17 nt, Homo sapiens
uguccauucucauucgu

SEQ ID NO: 816 - RNA, 17 nt, Homo sapiens
uccauucucauucgugg

SEQ ID NO: 817 - RNA, 17 nt, Homo sapiens
auucucauucguggcau

SEQ ID NO: 818 - RNA, 17 nt, Homo sapiens
uucucauucguggcaug

SEQ ID NO: 819 - RNA, 17 nt, Homo sapiens
uggcauguuuugauuug

SEQ ID NO: 820 - RNA, 17 nt, Homo sapiens
ggcauguuuugauuugu

SEQ ID NO: 821 - RNA, 17 nt, Homo sapiens
gcauguuuugauuugua

SEQ ID NO: 822 - RNA, 17 nt, Homo sapiens
guuuugauuuguagcac

SEQ ID NO: 823 - RNA, 17 nt, Homo sapiens
uuuugauuuguagcacu

SEQ ID NO: 824 - RNA, 17 nt, Homo sapiens
ugauuuguagcacugag

SEQ ID NO: 825 - RNA, 17 nt, Homo sapiens
guggcacucaacucuga

SEQ ID NO: 826 - RNA, 17 nt, Homo sapiens
acucaacucugagccca

SEQ ID NO: 827 - RNA, 17 nt, Homo sapiens
gagcccauacuuuuggc

SEQ ID NO: 828 - RNA, 17 nt, Homo sapiens
cccauacuuuuggcucc

SEQ ID NO: 829 - RNA, 17 nt, Homo sapiens
ccauacuuuuggcuccu

SEQ ID NO: 830 - RNA, 17 nt, Homo sapiens
cauacuuuuggcuccuc

SEQ ID NO: 831 - RNA, 17 nt, Homo sapiens
uuuuggcuccucuagua

SEQ ID NO: 832 - RNA, 17 nt, Homo sapiens
uggcuccucuaguaaga

SEQ ID NO: 833 - RNA, 17 nt, Homo sapiens
gcuccucuaguaagaug

SEQ ID NO: 834 - RNA, 17 nt, Homo sapiens
ccucuaguaagaugcac

SEQ ID NO: 835 - RNA, 17 nt, Homo sapiens
ugaaaacuuagccagag

SEQ ID NO: 836 - RNA, 17 nt, Homo sapiens
gaaaacuuagccagagu

SEQ ID NO: 837 - RNA, 17 nt, Homo sapiens
gccagaguuagguuguc

SEQ ID NO: 838 - RNA, 17 nt, Homo sapiens
ccagaguuagguugucu

SEQ ID NO: 839 - RNA, 17 nt, Homo sapiens
aguuagguugucuccag

SEQ ID NO: 840 - RNA, 17 nt, Homo sapiens
uagguugucuccaggcc

SEQ ID NO: 841 - RNA, 17 nt, Homo sapiens
gguugucuccaggccau

SEQ ID NO: 842 - RNA, 17 nt, Homo sapiens
gauggccuuacacugaa

SEQ ID NO: 843 - RNA, 17 nt, Homo sapiens
auggccuuacacugaaa

SEQ ID NO: 844 - RNA, 17 nt, Homo sapiens
gaaaaugucacauucua

SEQ ID NO: 845 - RNA, 17 nt, Homo sapiens
ugucacauucuauuuug

SEQ ID NO: 846 - RNA, 17 nt, Homo sapiens
gucacauucuauuuugg

SEQ ID NO: 847 - RNA, 17 nt, Homo sapiens
cacauucuauuuugggu

SEQ ID NO: 848 - RNA, 17 nt, Homo sapiens
cauucuauuuuggguau

SEQ ID NO: 849 - RNA, 17 nt, Homo sapiens
auucuauuuuggguauu

SEQ ID NO: 850 - RNA, 17 nt, Homo sapiens
uucuauuuuggguauua

SEQ ID NO: 851 - RNA, 17 nt, Homo sapiens
uuuuggguauuaauaua

SEQ ID NO: 852 - RNA, 17 nt, Homo sapiens
uuggguauuaauauaua

SEQ ID NO: 853 - RNA, 17 nt, Homo sapiens
uggguauuaauauauag

SEQ ID NO: 854 - RNA, 17 nt, Homo sapiens
guauuaauauauagucc

SEQ ID NO: 855 - RNA, 17 nt, Homo sapiens
auuaauauauaguccag

SEQ ID NO: 856 - RNA, 17 nt, Homo sapiens
uaauauauaguccagac

SEQ ID NO: 857 - RNA, 17 nt, Homo sapiens
uauauaguccagacacu

SEQ ID NO: 858 - RNA, 17 nt, Homo sapiens
cagacacuuaacucaau

SEQ ID NO: 859 - RNA, 17 nt, Homo sapiens
agacacuuaacucaauu

SEQ ID NO: 860 - RNA, 17 nt, Homo sapiens
acuuaacucaauuucuu

SEQ ID NO: 861 - RNA, 17 nt, Homo sapiens
aacucaauuucuuggua

SEQ ID NO: 862 - RNA, 17 nt, Homo sapiens
acucaauuucuugguau

SEQ ID NO: 863 - RNA, 17 nt, Homo sapiens
cucaauuucuugguauu

SEQ ID NO: 864 - RNA, 17 nt, Homo sapiens
caauuucuugguauuau

SEQ ID NO: 865 - RNA, 17 nt, Homo sapiens
uucuugguauuauucug

SEQ ID NO: 866 - RNA, 17 nt, Homo sapiens
cuugguauuauucuguu

SEQ ID NO: 867 - RNA, 17 nt, Homo sapiens
uugguauuauucuguuu

SEQ ID NO: 868 - RNA, 17 nt, Homo sapiens
gguauuauucuguuuug

SEQ ID NO: 869 - RNA, 17 nt, Homo sapiens
guauuauucuguuuugc

SEQ ID NO: 870 - RNA, 17 nt, Homo sapiens
uauucuguuuugcacag

SEQ ID NO: 871 - RNA, 17 nt, Homo sapiens
auucuguuuugcacagu

SEQ ID NO: 872 - RNA, 17 nt, Homo sapiens
uucuguuuugcacaguu

SEQ ID NO: 873 - RNA, 17 nt, Homo sapiens
ugcacaguuaguuguga

SEQ ID NO: 874 - RNA, 17 nt, Homo sapiens
gcacaguuaguugugaa

SEQ ID NO: 875 - RNA, 17 nt, Homo sapiens
caguuaguugugaaaga

SEQ ID NO: 876 - RNA, 17 nt, Homo sapiens
aaugcaguccugaggag

SEQ ID NO: 877 - RNA, 17 nt, Homo sapiens
aggagaguuuucuccau

SEQ ID NO: 878 - RNA, 17 nt, Homo sapiens
ggagaguuuucuccaua

SEQ ID NO: 879 - RNA, 17 nt, Homo sapiens
gagaguuuucuccauau

SEQ ID NO: 880 - RNA, 17 nt, Homo sapiens
agaguuuucuccauauc

SEQ ID NO: 881 - RNA, 17 nt, Homo sapiens
aguuuucuccauaucaa

SEQ ID NO: 882 - RNA, 17 nt, Homo sapiens
uucuccauaucaaaacg

SEQ ID NO: 883 - RNA, 17 nt, Homo sapiens
cuccauaucaaaacgag

SEQ ID NO: 884 - RNA, 17 nt, Homo sapiens
aaaaaggucaauaaggu

SEQ ID NO: 885 - RNA, 17 nt, Homo sapiens
aggucaauaaggucaag

SEQ ID NO: 886 - RNA, 17 nt, Homo sapiens
aauaaggucaagggaag

SEQ ID NO: 887 - RNA, 17 nt, Homo sapiens
gaccccgucucuauacc

SEQ ID NO: 888 - RNA, 17 nt, Homo sapiens
ccccgucucuauaccaa

SEQ ID NO: 889 - RNA, 17 nt, Homo sapiens
ccgucucuauaccaacc

SEQ ID NO: 890 - RNA, 17 nt, Homo sapiens
gucucuauaccaaccaa

SEQ ID NO: 891 - RNA, 17 nt, Homo sapiens
aaaccaauucaccaaca

SEQ ID NO: 892 - RNA, 17 nt, Homo sapiens
aaccaauucaccaacac

SEQ ID NO: 893 - RNA, 17 nt, Homo sapiens
aacacaguugggaccca

SEQ ID NO: 894 - RNA, 17 nt, Homo sapiens
caggaagucagucacgu

SEQ ID NO: 895 - RNA, 17 nt, Homo sapiens
aagucagucacguuucc

SEQ ID NO: 896 - RNA, 17 nt, Homo sapiens
agucacguuuccuuuuc

SEQ ID NO: 897 - RNA, 17 nt, Homo sapiens
gucacguuuccuuuuca

SEQ ID NO: 898 - RNA, 17 nt, Homo sapiens
ucacguuuccuuuucau

SEQ ID NO: 899 - RNA, 17 nt, Homo sapiens
cguuuccuuuucauuua

SEQ ID NO: 900 - RNA, 17 nt, Homo sapiens
guuuccuuuucauuuaa

SEQ ID NO: 901 - RNA, 17 nt, Homo sapiens
uuuccuuuucauuuaau

SEQ ID NO: 902 - RNA, 17 nt, Homo sapiens
uuccuuuucauuuaaug

SEQ ID NO: 903 - RNA, 17 nt, Homo sapiens
cuuuucauuuaaugggg

SEQ ID NO: 904 - RNA, 17 nt, Homo sapiens
uuuucauuuaaugggga

SEQ ID NO: 905 - RNA, 17 nt, Homo sapiens
uuucauuuaauggggau

SEQ ID NO: 906 - RNA, 17 nt, Homo sapiens
auggggauuccacuauc

SEQ ID NO: 907 - RNA, 17 nt, Homo sapiens
uggggauuccacuaucu

SEQ ID NO: 908 - RNA, 17 nt, Homo sapiens
auuccacuaucucacac

SEQ ID NO: 909 - RNA, 17 nt, Homo sapiens
uccacuaucucacacua

SEQ ID NO: 910 - RNA, 17 nt, Homo sapiens
cacuaucucacacuaau

SEQ ID NO: 911 - RNA, 17 nt, Homo sapiens
cucacacuaaucugaaa

SEQ ID NO: 912 - RNA, 17 nt, Homo sapiens
acacuaaucugaaagga

SEQ ID NO: 913 - RNA, 17 nt, Homo sapiens
aagagcauuagcuggcg

SEQ ID NO: 914 - RNA, 17 nt, Homo sapiens
agagcauuagcuggcgc

SEQ ID NO: 915 - RNA, 17 nt, Homo sapiens
uggcgcauauuaagcac

SEQ ID NO: 916 - RNA, 17 nt, Homo sapiens
gcgcauauuaagcacuu

SEQ ID NO: 917 - RNA, 17 nt, Homo sapiens
cgcauauuaagcacuuu

SEQ ID NO: 918 - RNA, 17 nt, Homo sapiens
uaagcacuuuaagcucc

SEQ ID NO: 919 - RNA, 17 nt, Homo sapiens
aagcacuuuaagcuccu

SEQ ID NO: 920 - RNA, 17 nt, Homo sapiens
agcacuuuaagcuccuu

SEQ ID NO: 921 - RNA, 17 nt, Homo sapiens
uuuaagcuccuugagua

SEQ ID NO: 922 - RNA, 17 nt, Homo sapiens
aagcuccuugaguaaaa

SEQ ID NO: 923 - RNA, 17 nt, Homo sapiens
ccuugaguaaaaaggug

SEQ ID NO: 924 - RNA, 17 nt, Homo sapiens
aaggugguauguaauuu

SEQ ID NO: 925 - RNA, 17 nt, Homo sapiens
ugguauguaauuuaugc

SEQ ID NO: 926 - RNA, 17 nt, Homo sapiens
uauguaauuuaugcaag

SEQ ID NO: 927 - RNA, 17 nt, Homo sapiens
auguaauuuaugcaagg

SEQ ID NO: 928 - RNA, 17 nt, Homo sapiens
uguaauuuaugcaaggu

SEQ ID NO: 929 - RNA, 17 nt, Homo sapiens
ugcaagguauuucucca

SEQ ID NO: 930 - RNA, 17 nt, Homo sapiens
caagguauuucuccagu

SEQ ID NO: 931 - RNA, 17 nt, Homo sapiens
aagguauuucuccaguu

SEQ ID NO: 932 - RNA, 17 nt, Homo sapiens
agguauuucuccaguug

SEQ ID NO: 933 - RNA, 17 nt, Homo sapiens
guauuucuccaguuggg

SEQ ID NO: 934 - RNA, 17 nt, Homo sapiens
ucuccaguugggacuca

SEQ ID NO: 935 - RNA, 17 nt, Homo sapiens
uugggacucaggauauu

SEQ ID NO: 936 - RNA, 17 nt, Homo sapiens
cucaggauauuaguuaa

SEQ ID NO: 937 - RNA, 17 nt, Homo sapiens
caggauauuaguuaaug

SEQ ID NO: 938 - RNA, 17 nt, Homo sapiens
aggauauuaguuaauga

SEQ ID NO: 939 - RNA, 17 nt, Homo sapiens
auauuaguuaaugagcc

SEQ ID NO: 940 - RNA, 17 nt, Homo sapiens
uauuaguuaaugagcca

SEQ ID NO: 941 - RNA, 17 nt, Homo sapiens
ugagccaucacuagaag

SEQ ID NO: 942 - RNA, 17 nt, Homo sapiens
ccaucacuagaagaaaa

SEQ ID NO: 943 - RNA, 17 nt, Homo sapiens
aagcccauuuucaacug

SEQ ID NO: 944 - RNA, 17 nt, Homo sapiens
agcccauuuucaacugc

SEQ ID NO: 945 - RNA, 17 nt, Homo sapiens
gcccauuuucaacugcu

SEQ ID NO: 946 - RNA, 17 nt, Homo sapiens
cccauuuucaacugcuu

SEQ ID NO: 947 - RNA, 17 nt, Homo sapiens
caacugcuuugaaacuu

SEQ ID NO: 948 - RNA, 17 nt, Homo sapiens
aacugcuuugaaacuug

SEQ ID NO: 949 - RNA, 17 nt, Homo sapiens
uugaaacuugccugggg

SEQ ID NO: 950 - RNA, 17 nt, Homo sapiens
ccuggggucugagcaug

SEQ ID NO: 951 - RNA, 17 nt, Homo sapiens
augggaauagggagaca

SEQ ID NO: 952 - RNA, 17 nt, Homo sapiens
gacaggguaggaaaggg

SEQ ID NO: 953 - RNA, 17 nt, Homo sapiens
gggcgccuacucuucag

SEQ ID NO: 954 - RNA, 17 nt, Homo sapiens
cgccuacucuucagggu

SEQ ID NO: 955 - RNA, 17 nt, Homo sapiens
ccuacucuucagggucu

SEQ ID NO: 956 - RNA, 17 nt, Homo sapiens
cuacucuucagggucua

SEQ ID NO: 957 - RNA, 17 nt, Homo sapiens
uucagggucuaaagauc

SEQ ID NO: 958 - RNA, 17 nt, Homo sapiens
cagggucuaaagaucaa

SEQ ID NO: 959 - RNA, 17 nt, Homo sapiens
cuaaagaucaagugggc

SEQ ID NO: 960 - RNA, 17 nt, Homo sapiens
gugggccuuggaucgcu

SEQ ID NO: 961 - RNA, 17 nt, Homo sapiens
ccuuggaucgcuaagcu

SEQ ID NO: 962 - RNA, 17 nt, Homo sapiens
ggaucgcuaagcuggcu

SEQ ID NO: 963 - RNA, 17 nt, Homo sapiens
agcuggcucuguuugau

SEQ ID NO: 964 - RNA, 17 nt, Homo sapiens
ggcucuguuugaugcua

SEQ ID NO: 965 - RNA, 17 nt, Homo sapiens
gcucuguuugaugcuau

SEQ ID NO: 966 - RNA, 17 nt, Homo sapiens
uugaugcuauuuaugca

SEQ ID NO: 967 - RNA, 17 nt, Homo sapiens
gaugcuauuuaugcaag

SEQ ID NO: 968 - RNA, 17 nt, Homo sapiens
augcuauuuaugcaagu

SEQ ID NO: 969 - RNA, 17 nt, Homo sapiens
ugcuauuuaugcaaguu

SEQ ID NO: 970 - RNA, 17 nt, Homo sapiens
augcaaguuagggucua

SEQ ID NO: 971 - RNA, 17 nt, Homo sapiens
ugcaaguuagggucuau

SEQ ID NO: 972 - RNA, 17 nt, Homo sapiens
guuagggucuauguauu

SEQ ID NO: 973 - RNA, 17 nt, Homo sapiens
uagggucuauguauuua

SEQ ID NO: 974 - RNA, 17 nt, Homo sapiens
gucuauguauuuaggau

SEQ ID NO: 975 - RNA, 17 nt, Homo sapiens
cuauguauuuaggaugc

SEQ ID NO: 976 - RNA, 17 nt, Homo sapiens
uauguauuuaggaugcg

SEQ ID NO: 977 - RNA, 17 nt, Homo sapiens
auguauuuaggaugcgc

SEQ ID NO: 978 - RNA, 17 nt, Homo sapiens
augcgccuacucuucag

SEQ ID NO: 979 - RNA, 17 nt, Homo sapiens
cuauguauuuaggaugu

SEQ ID NO: 980 - RNA, 17 nt, Homo sapiens
uauguauuuaggauguc

SEQ ID NO: 981 - RNA, 17 nt, Homo sapiens
auguauuuaggaugucu

SEQ ID NO: 982 - RNA, 17 nt, Homo sapiens
uaggaugucugcaccuu

SEQ ID NO: 983 - RNA, 17 nt, Homo sapiens
cugcaccuucugcagcc

SEQ ID NO: 984 - RNA, 17 nt, Homo sapiens
ugcaccuucugcagcca

SEQ ID NO: 985 - RNA, 17 nt, Homo sapiens
cagccagucagaagcug

SEQ ID NO: 986 - RNA, 17 nt, Homo sapiens
caguggauugcugcuuc

SEQ ID NO: 987 - RNA, 17 nt, Homo sapiens
uugcugcuucuugggga

SEQ ID NO: 988 - RNA, 17 nt, Homo sapiens
ugcugcuucuuggggag

SEQ ID NO: 989 - RNA, 17 nt, Homo sapiens
cugcuucuuggggagaa

SEQ ID NO: 990 - RNA, 17 nt, Homo sapiens
agaagaguaugcuuccu

SEQ ID NO: 991 - RNA, 17 nt, Homo sapiens
aguaugcuuccuuuuau

SEQ ID NO: 992 - RNA, 17 nt, Homo sapiens
guaugcuuccuuuuauc

SEQ ID NO: 993 - RNA, 17 nt, Homo sapiens
ugcuuccuuuuauccau

SEQ ID NO: 994 - RNA, 17 nt, Homo sapiens
gcuuccuuuuauccaug

SEQ ID NO: 995 - RNA, 17 nt, Homo sapiens
cuuccuuuuauccaugu

SEQ ID NO: 996 - RNA, 17 nt, Homo sapiens
uuccuuuuauccaugua

SEQ ID NO: 997 - RNA, 17 nt, Homo sapiens
ccuuuuauccauguaau

SEQ ID NO: 998 - RNA, 17 nt, Homo sapiens
auccauguaauuuaacu

SEQ ID NO: 999 - RNA, 17 nt, Homo sapiens
cauguaauuuaacugua

SEQ ID NO: 1000 - RNA, 17 nt, Homo sapiens
auguaauuuaacuguag

SEQ ID NO: 1001 - RNA, 17 nt, Homo sapiens
uguaauuuaacuguaga

SEQ ID NO: 1002 - RNA, 17 nt, Homo sapiens
uuaacuguagaaccuga

SEQ ID NO: 1003 - RNA, 17 nt, Homo sapiens
ccugagcucuaaguaac

SEQ ID NO: 1004 - RNA, 17 nt, Homo sapiens
ugagcucuaaguaaccg

SEQ ID NO: 1005 - RNA, 17 nt, Homo sapiens
cucuaaguaaccgaaga

SEQ ID NO: 1006 - RNA, 17 nt, Homo sapiens
aagaauguaugccucug

SEQ ID NO: 1007 - RNA, 17 nt, Homo sapiens
guaugccucuguucuua

SEQ ID NO: 1008 - RNA, 17 nt, Homo sapiens
gccucuguucuuaugug

SEQ ID NO: 1009 - RNA, 17 nt, Homo sapiens
ccucuguucuuaugugc

SEQ ID NO: 1010 - RNA, 17 nt, Homo sapiens
ucuguucuuaugugcca

SEQ ID NO: 1011 - RNA, 17 nt, Homo sapiens
cuguucuuaugugccac

SEQ ID NO: 1012 - RNA, 17 nt, Homo sapiens
ugccacauccuuguuua

SEQ ID NO: 1013 - RNA, 17 nt, Homo sapiens
cacauccuuguuuaaag

SEQ ID NO: 1014 - RNA, 17 nt, Homo sapiens
auccuuguuuaaaggcu

SEQ ID NO: 1015 - RNA, 17 nt, Homo sapiens
uccuuguuuaaaggcuc

SEQ ID NO: 1016 - RNA, 17 nt, Homo sapiens
ccuuguuuaaaggcucu

SEQ ID NO: 1017 - RNA, 17 nt, Homo sapiens
uaaaggcucucuguaug

SEQ ID NO: 1018 - RNA, 17 nt, Homo sapiens
aaggcucucuguaugaa

SEQ ID NO: 1019 - RNA, 17 nt, Homo sapiens
cucucuguaugaagaga

SEQ ID NO: 1020 - RNA, 17 nt, Homo sapiens
gggaccgucaucagcac

SEQ ID NO: 1021 - RNA, 17 nt, Homo sapiens
accgucaucagcacauu

SEQ ID NO: 1022 - RNA, 17 nt, Homo sapiens
cagcacauucccuagug

SEQ ID NO: 1023 - RNA, 17 nt, Homo sapiens
agcacauucccuaguga

SEQ ID NO: 1024 - RNA, 17 nt, Homo sapiens
cauucccuagugagccu

SEQ ID NO: 1025 - RNA, 17 nt, Homo sapiens
gugagccuacuggcucc

SEQ ID NO: 1026 - RNA, 17 nt, Homo sapiens
uacuggcuccuggcagc

SEQ ID NO: 1027 - RNA, 17 nt, Homo sapiens
cagcggcuuuuguggaa

SEQ ID NO: 1028 - RNA, 17 nt, Homo sapiens
agcggcuuuuguggaag

SEQ ID NO: 1029 - RNA, 17 nt, Homo sapiens
gcggcuuuuguggaaga

SEQ ID NO: 1030 - RNA, 17 nt, Homo sapiens
ggaagacucacuagcca

SEQ ID NO: 1031 - RNA, 17 nt, Homo sapiens
gacucacuagccagaag

SEQ ID NO: 1032 - RNA, 17 nt, Homo sapiens
gggacaguccucuccac

SEQ ID NO: 1033 - RNA, 17 nt, Homo sapiens
acaguccucuccaccaa

SEQ ID NO: 1034 - RNA, 17 nt, Homo sapiens
aguccucuccaccaaga

SEQ ID NO: 1035 - RNA, 17 nt, Homo sapiens
accaagaucuaaaucca

SEQ ID NO: 1036 - RNA, 17 nt, Homo sapiens
caagaucuaaauccaaa

SEQ ID NO: 1037 - RNA, 17 nt, Homo sapiens
aucuaaauccaaacaaa

SEQ ID NO: 1038 - RNA, 17 nt, Homo sapiens
agcaggcuagagccaga

SEQ ID NO: 1039 - RNA, 17 nt, Homo sapiens
ggacaaaucuuuguugu

SEQ ID NO: 1040 - RNA, 17 nt, Homo sapiens
acaaaucuuuguuguuc

SEQ ID NO: 1041 - RNA, 17 nt, Homo sapiens
caaaucuuuguuguucc

SEQ ID NO: 1042 - RNA, 17 nt, Homo sapiens
aucuuuguuguuccucu

SEQ ID NO: 1043 - RNA, 17 nt, Homo sapiens
uuuguuguuccucuucu

SEQ ID NO: 1044 - RNA, 17 nt, Homo sapiens
uuguuguuccucuucuu

SEQ ID NO: 1045 - RNA, 17 nt, Homo sapiens
uuguuccucuucuuuac

SEQ ID NO: 1046 - RNA, 17 nt, Homo sapiens
guuccucuucuuuacac

SEQ ID NO: 1047 - RNA, 17 nt, Homo sapiens
uuccucuucuuuacaca

SEQ ID NO: 1048 - RNA, 17 nt, Homo sapiens
ccucuucuuuacacaua

SEQ ID NO: 1049 - RNA, 17 nt, Homo sapiens
cucuucuuuacacauac

SEQ ID NO: 1050 - RNA, 17 nt, Homo sapiens
ucuucuuuacacauacg

SEQ ID NO: 1051 - RNA, 17 nt, Homo sapiens
uuacacauacgcaaacc

SEQ ID NO: 1052 - RNA, 17 nt, Homo sapiens
cuggcaauuuuauaaau

SEQ ID NO: 1053 - RNA, 17 nt, Homo sapiens
uggcaauuuuauaaauc

SEQ ID NO: 1054 - RNA, 17 nt, Homo sapiens
ggcaauuuuauaaauca

SEQ ID NO: 1055 - RNA, 17 nt, Homo sapiens
gcaauuuuauaaaucag

SEQ ID NO: 1056 - RNA, 17 nt, Homo sapiens
aauuuuauaaaucaggu

SEQ ID NO: 1057 - RNA, 17 nt, Homo sapiens
uuauaaaucagguaacu

SEQ ID NO: 1058 - RNA, 17 nt, Homo sapiens
aaucagguaacuggaag

SEQ ID NO: 1059 - RNA, 17 nt, Homo sapiens
aaggagguuaaacucag

SEQ ID NO: 1060 - RNA, 17 nt, Homo sapiens
aggagguuaaacucaga

SEQ ID NO: 1061 - RNA, 17 nt, Homo sapiens
guuaaacucagaaaaaa

SEQ ID NO: 1062 - RNA, 17 nt, Homo sapiens
gaagaccucagucaauu

SEQ ID NO: 1063 - RNA, 17 nt, Homo sapiens
accucagucaauucucu

SEQ ID NO: 1064 - RNA, 17 nt, Homo sapiens
cagucaauucucuacuu

SEQ ID NO: 1065 - RNA, 17 nt, Homo sapiens
agucaauucucuacuuu

SEQ ID NO: 1066 - RNA, 17 nt, Homo sapiens
ucaauucucuacuuuuu

SEQ ID NO: 1067 - RNA, 17 nt, Homo sapiens
aauucucuacuuuuuuu

SEQ ID NO: 1068 - RNA, 17 nt, Homo sapiens
ucucuacuuuuuuuuuu

SEQ ID NO: 1069 - RNA, 17 nt, Homo sapiens
cucuacuuuuuuuuuuu

SEQ ID NO: 1070 - RNA, 17 nt, Homo sapiens
ucuacuuuuuuuuuuuu

SEQ ID NO: 1071 - RNA, 17 nt, Homo sapiens
cuacuuuuuuuuuuuuu

SEQ ID NO: 1072 - RNA, 17 nt, Homo sapiens
uacuuuuuuuuuuuuuu

SEQ ID NO: 1073 - RNA, 17 nt, Homo sapiens
acuuuuuuuuuuuuuuu

SEQ ID NO: 1074 - RNA, 17 nt, Homo sapiens
cuuuuuuuuuuuuuuuu

SEQ ID NO: 1075 - RNA, 17 nt, Homo sapiens
uuuuuuuuuuuuuuuuc

SEQ ID NO: 1076 - RNA, 17 nt, Homo sapiens
uuuuuuuuuuuuuuucc

SEQ ID NO: 1077 - RNA, 17 nt, Homo sapiens
uuuuuuuuuuuuuucca

SEQ ID NO: 1078 - RNA, 17 nt, Homo sapiens
uuuuuuuuuuuuuccaa

SEQ ID NO: 1079 - RNA, 17 nt, Homo sapiens
uuuuuuuuuuuuccaaa

SEQ ID NO: 1080 - RNA, 17 nt, Homo sapiens
uuuuuuuuuuuccaaau

SEQ ID NO: 1081 - RNA, 17 nt, Homo sapiens
uuuuuuuuuuccaaauc

SEQ ID NO: 1082 - RNA, 17 nt, Homo sapiens
uuuuuuuuuccaaauca

SEQ ID NO: 1083 - RNA, 17 nt, Homo sapiens
uuuuuuuuccaaaucag

SEQ ID NO: 1084 - RNA, 17 nt, Homo sapiens
uuccaaaucagauaaua

SEQ ID NO: 1085 - RNA, 17 nt, Homo sapiens
aaucagauaauagccca

SEQ ID NO: 1086 - RNA, 17 nt, Homo sapiens
cagauaauagcccagca

SEQ ID NO: 1087 - RNA, 17 nt, Homo sapiens
cagcaaauagugauaac

SEQ ID NO: 1088 - RNA, 17 nt, Homo sapiens
auagugauaacaaauaa

SEQ ID NO: 1089 - RNA, 17 nt, Homo sapiens
uaacaaauaaaaccuua

SEQ ID NO: 1090 - RNA, 17 nt, Homo sapiens
uaaaaccuuagcuguuc

SEQ ID NO: 1091 - RNA, 17 nt, Homo sapiens
aaaaccuuagcuguuca

SEQ ID NO: 1092 - RNA, 17 nt, Homo sapiens
uuagcuguucaugucuu

SEQ ID NO: 1093 - RNA, 17 nt, Homo sapiens
uagcuguucaugucuug

SEQ ID NO: 1094 - RNA, 17 nt, Homo sapiens
guucaugucuugauuuc

SEQ ID NO: 1095 - RNA, 17 nt, Homo sapiens
ucaugucuugauuucaa

SEQ ID NO: 1096 - RNA, 17 nt, Homo sapiens
gucuugauuucaauaau

SEQ ID NO: 1097 - RNA, 17 nt, Homo sapiens
ucuugauuucaauaauu

SEQ ID NO: 1098 - RNA, 17 nt, Homo sapiens
cuugauuucaauaauua

SEQ ID NO: 1099 - RNA, 17 nt, Homo sapiens
auuucaauaauuaauuc

SEQ ID NO: 1100 - RNA, 17 nt, Homo sapiens
ucaauaauuaauucuua

SEQ ID NO: 1101 - RNA, 17 nt, Homo sapiens
caauaauuaauucuuaa

SEQ ID NO: 1102 - RNA, 17 nt, Homo sapiens
uaauuaauucuuaauca

SEQ ID NO: 1103 - RNA, 17 nt, Homo sapiens
aauuaauucuuaaucau

SEQ ID NO: 1104 - RNA, 17 nt, Homo sapiens
uuaauucuuaaucauua

SEQ ID NO: 1105 - RNA, 17 nt, Homo sapiens
uaauucuuaaucauuaa

SEQ ID NO: 1106 - RNA, 17 nt, Homo sapiens
uucuuaaucauuaagag

SEQ ID NO: 1107 - RNA, 17 nt, Homo sapiens
uuaaucauuaagagacc

SEQ ID NO: 1108 - RNA, 17 nt, Homo sapiens
uaaucauuaagagacca

SEQ ID NO: 1109 - RNA, 17 nt, Homo sapiens
gagaccauaauaaauac

SEQ ID NO: 1110 - RNA, 17 nt, Homo sapiens
accauaauaaauacucc

SEQ ID NO: 1111 - RNA, 17 nt, Homo sapiens
uaauaaauacuccuuuu

SEQ ID NO: 1112 - RNA, 17 nt, Homo sapiens
uaaauacuccuuuucaa

SEQ ID NO: 1113 - RNA, 17 nt, Homo sapiens
auacuccuuuucaagag

SEQ ID NO: 1114 - RNA, 17 nt, Homo sapiens
uacuccuuuucaagaga

SEQ ID NO: 1115 - RNA, 17 nt, Homo sapiens
acuccuuuucaagagaa

SEQ ID NO: 1116 - RNA, 17 nt, Homo sapiens
cuccuuuucaagagaaa

SEQ ID NO: 1117 - RNA, 17 nt, Homo sapiens
aaaaccauuagaauugu

SEQ ID NO: 1118 - RNA, 17 nt, Homo sapiens
aaaccauuagaauuguu

SEQ ID NO: 1119 - RNA, 17 nt, Homo sapiens
auuagaauuguuacuca

SEQ ID NO: 1120 - RNA, 17 nt, Homo sapiens
agaauuguuacucagcu

SEQ ID NO: 1121 - RNA, 17 nt, Homo sapiens
gaauuguuacucagcuc

SEQ ID NO: 1122 - RNA, 17 nt, Homo sapiens
uuguuacucagcuccuu

SEQ ID NO: 1123 - RNA, 17 nt, Homo sapiens
acucagcuccuucaaac

SEQ ID NO: 1124 - RNA, 17 nt, Homo sapiens
cagcuccuucaaacuca

SEQ ID NO: 1125 - RNA, 17 nt, Homo sapiens
agcuccuucaaacucag

SEQ ID NO: 1126 - RNA, 17 nt, Homo sapiens
uucaaacucagguuugu

SEQ ID NO: 1127 - RNA, 17 nt, Homo sapiens
acucagguuuguagcau

SEQ ID NO: 1128 - RNA, 17 nt, Homo sapiens
cucagguuuguagcaua

SEQ ID NO: 1129 - RNA, 17 nt, Homo sapiens
agguuuguagcauacau

SEQ ID NO: 1130 - RNA, 17 nt, Homo sapiens
uguagcauacaugaguc

SEQ ID NO: 1131 - RNA, 17 nt, Homo sapiens
acaugaguccauccauc

SEQ ID NO: 1132 - RNA, 17 nt, Homo sapiens
gaguccauccaucaguc

SEQ ID NO: 1133 - RNA, 17 nt, Homo sapiens
ccauccaucagucaaag

SEQ ID NO: 1134 - RNA, 17 nt, Homo sapiens
ccaucagucaaagaaug

SEQ ID NO: 1135 - RNA, 17 nt, Homo sapiens
agaaugguuccaucugg

SEQ ID NO: 1136 - RNA, 17 nt, Homo sapiens
gaaugguuccaucugga

SEQ ID NO: 1137 - RNA, 17 nt, Homo sapiens
gguuccaucuggagucu

SEQ ID NO: 1138 - RNA, 17 nt, Homo sapiens
ucuggagucuuaaugua

SEQ ID NO: 1139 - RNA, 17 nt, Homo sapiens
uggagucuuaauguaga

SEQ ID NO: 1140 - RNA, 17 nt, Homo sapiens
ggagucuuaauguagaa

SEQ ID NO: 1141 - RNA, 17 nt, Homo sapiens
cuuaauguagaaagaaa

SEQ ID NO: 1142 - RNA, 17 nt, Homo sapiens
uggagacuuguaauaau

SEQ ID NO: 1143 - RNA, 17 nt, Homo sapiens
agacuuguaauaaugag

SEQ ID NO: 1144 - RNA, 17 nt, Homo sapiens
cuuguaauaaugagcua

SEQ ID NO: 1145 - RNA, 17 nt, Homo sapiens
aaugagcuaguuacaaa

SEQ ID NO: 1146 - RNA, 17 nt, Homo sapiens
gagcuaguuacaaagug

SEQ ID NO: 1147 - RNA, 17 nt, Homo sapiens
agcuaguuacaaagugc

SEQ ID NO: 1148 - RNA, 17 nt, Homo sapiens
aaagugcuuguucauua

SEQ ID NO: 1149 - RNA, 17 nt, Homo sapiens
gugcuuguucauuaaaa

SEQ ID NO: 1150 - RNA, 17 nt, Homo sapiens
ugcuuguucauuaaaau

SEQ ID NO: 1151 - RNA, 17 nt, Homo sapiens
uuguucauuaaaauagc

SEQ ID NO: 1152 - RNA, 17 nt, Homo sapiens
uguucauuaaaauagca

SEQ ID NO: 1153 - RNA, 17 nt, Homo sapiens
auuaaaauagcacugaa

SEQ ID NO: 1154 - RNA, 17 nt, Homo sapiens
cugaaaauugaaacaug

SEQ ID NO: 1155 - RNA, 17 nt, Homo sapiens
acaugaauuaacugaua

SEQ ID NO: 1156 - RNA, 17 nt, Homo sapiens
caugaauuaacugauaa

SEQ ID NO: 1157 - RNA, 17 nt, Homo sapiens
uaacugauaauauucca

SEQ ID NO: 1158 - RNA, 17 nt, Homo sapiens
cugauaauauuccaauc

SEQ ID NO: 1159 - RNA, 17 nt, Homo sapiens
gauaauauuccaaucau

SEQ ID NO: 1160 - RNA, 17 nt, Homo sapiens
auaauauuccaaucauu

SEQ ID NO: 1161 - RNA, 17 nt, Homo sapiens
auuccaaucauuugcca

SEQ ID NO: 1162 - RNA, 17 nt, Homo sapiens
ccaaucauuugccauuu

SEQ ID NO: 1163 - RNA, 17 nt, Homo sapiens
caaucauuugccauuua

SEQ ID NO: 1164 - RNA, 17 nt, Homo sapiens
uuugccauuuaugacaa

SEQ ID NO: 1165 - RNA, 17 nt, Homo sapiens
uugccauuuaugacaaa

SEQ ID NO: 1166 - RNA, 17 nt, Homo sapiens
ugccauuuaugacaaaa

SEQ ID NO: 1167 - RNA, 17 nt, Homo sapiens
aaaaugguuggcacuaa

SEQ ID NO: 1168 - RNA, 17 nt, Homo sapiens
uuggcacuaacaaagaa

SEQ ID NO: 1169 - RNA, 17 nt, Homo sapiens
cgagcacuuccuuucag

SEQ ID NO: 1170 - RNA, 17 nt, Homo sapiens
gagcacuuccuuucaga

SEQ ID NO: 1171 - RNA, 17 nt, Homo sapiens
cacuuccuuucagaguu

SEQ ID NO: 1172 - RNA, 17 nt, Homo sapiens
acuuccuuucagaguuu

SEQ ID NO: 1173 - RNA, 17 nt, Homo sapiens
cuuccuuucagaguuuc

SEQ ID NO: 1174 - RNA, 17 nt, Homo sapiens
uucagaguuucugagau

SEQ ID NO: 1175 - RNA, 17 nt, Homo sapiens
ucagaguuucugagaua

SEQ ID NO: 1176 - RNA, 17 nt, Homo sapiens
cagaguuucugagauaa

SEQ ID NO: 1177 - RNA, 17 nt, Homo sapiens
ucugagauaauguacgu

SEQ ID NO: 1178 - RNA, 17 nt, Homo sapiens
gauaauguacguggaac

SEQ ID NO: 1179 - RNA, 17 nt, Homo sapiens
ggaacagucugggugga

SEQ ID NO: 1180 - RNA, 17 nt, Homo sapiens
gugcaagucugugucuu

SEQ ID NO: 1181 - RNA, 17 nt, Homo sapiens
gucugugucuugucagu

SEQ ID NO: 1182 - RNA, 17 nt, Homo sapiens
cugugucuugucagucc

SEQ ID NO: 1183 - RNA, 17 nt, Homo sapiens
ugucuugucaguccaag

SEQ ID NO: 1184 - RNA, 17 nt, Homo sapiens
uugucaguccaagaagu

SEQ ID NO: 1185 - RNA, 17 nt, Homo sapiens
cgagauguuaauuuuag

SEQ ID NO: 1186 - RNA, 17 nt, Homo sapiens
gagauguuaauuuuagg

SEQ ID NO: 1187 - RNA, 17 nt, Homo sapiens
auguuaauuuuagggac

SEQ ID NO: 1188 - RNA, 17 nt, Homo sapiens
uguuaauuuuagggacc

SEQ ID NO: 1189 - RNA, 17 nt, Homo sapiens
guuaauuuuagggaccc

SEQ ID NO: 1190 - RNA, 17 nt, Homo sapiens
uuaauuuuagggacccg

SEQ ID NO: 1191 - RNA, 17 nt, Homo sapiens
ccgugccuuguuuccua

SEQ ID NO: 1192 - RNA, 17 nt, Homo sapiens
ugccuuguuuccuagcc

SEQ ID NO: 1193 - RNA, 17 nt, Homo sapiens
gccuuguuuccuagccc

SEQ ID NO: 1194 - RNA, 17 nt, Homo sapiens
ccuuguuuccuagccca

SEQ ID NO: 1195 - RNA, 17 nt, Homo sapiens
uguuuccuagcccacaa

SEQ ID NO: 1196 - RNA, 17 nt, Homo sapiens
gcaaacaucaaacagau

SEQ ID NO: 1197 - RNA, 17 nt, Homo sapiens
aaacagauacucgcuag

SEQ ID NO: 1198 - RNA, 17 nt, Homo sapiens
cagauacucgcuagccu

SEQ ID NO: 1199 - RNA, 17 nt, Homo sapiens
uacucgcuagccucauu

SEQ ID NO: 1200 - RNA, 17 nt, Homo sapiens
gcuagccucauuuaaau

SEQ ID NO: 1201 - RNA, 17 nt, Homo sapiens
agccucauuuaaauuga

SEQ ID NO: 1202 - RNA, 17 nt, Homo sapiens
gccucauuuaaauugau

SEQ ID NO: 1203 - RNA, 17 nt, Homo sapiens
ccucauuuaaauugauu

SEQ ID NO: 1204 - RNA, 17 nt, Homo sapiens
auuuaaauugauuaaag

SEQ ID NO: 1205 - RNA, 17 nt, Homo sapiens
aaauugauuaaaggagg

SEQ ID NO: 1206 - RNA, 17 nt, Homo sapiens
aauugauuaaaggagga

SEQ ID NO: 1207 - RNA, 17 nt, Homo sapiens
gagugcaucuuuggccg

SEQ ID NO: 1208 - RNA, 17 nt, Homo sapiens
gugcaucuuuggccgac

SEQ ID NO: 1209 - RNA, 17 nt, Homo sapiens
ugcaucuuuggccgaca

SEQ ID NO: 1210 - RNA, 17 nt, Homo sapiens
agugguguaacugugug

SEQ ID NO: 1211 - RNA, 17 nt, Homo sapiens
guggguguauguguguu

SEQ ID NO: 1212 - RNA, 17 nt, Homo sapiens
auguguguuuugugcau

SEQ ID NO: 1213 - RNA, 17 nt, Homo sapiens
uguguguuuugugcaua

SEQ ID NO: 1214 - RNA, 17 nt, Homo sapiens
guguguuuugugcauaa

SEQ ID NO: 1215 - RNA, 17 nt, Homo sapiens
uugugcauaacuauuua

SEQ ID NO: 1216 - RNA, 17 nt, Homo sapiens
gcauaacuauuuaagga

SEQ ID NO: 1217 - RNA, 17 nt, Homo sapiens
auaacuauuuaaggaaa

SEQ ID NO: 1218 - RNA, 17 nt, Homo sapiens
uaacuauuuaaggaaac

SEQ ID NO: 1219 - RNA, 17 nt, Homo sapiens
aacuauuuaaggaaacu

SEQ ID NO: 1220 - RNA, 17 nt, Homo sapiens
acuggaauuuuaaaguu

SEQ ID NO: 1221 - RNA, 17 nt, Homo sapiens
cuggaauuuuaaaguua

SEQ ID NO: 1222 - RNA, 17 nt, Homo sapiens
uggaauuuuaaaguuac

SEQ ID NO: 1223 - RNA, 17 nt, Homo sapiens
ggaauuuuaaaguuacu

SEQ ID NO: 1224 - RNA, 17 nt, Homo sapiens
uuuaaaguuacuuuuau

SEQ ID NO: 1225 - RNA, 17 nt, Homo sapiens
uuaaaguuacuuuuaua

SEQ ID NO: 1226 - RNA, 17 nt, Homo sapiens
aaguuacuuuuauacaa

SEQ ID NO: 1227 - RNA, 17 nt, Homo sapiens
aguuacuuuuauacaaa

SEQ ID NO: 1228 - RNA, 17 nt, Homo sapiens
guuacuuuuauacaaac

SEQ ID NO: 1229 - RNA, 17 nt, Homo sapiens
uuacuuuuauacaaacc

SEQ ID NO: 1230 - RNA, 17 nt, Homo sapiens
acuuuuauacaaaccaa

SEQ ID NO: 1231 - RNA, 17 nt, Homo sapiens
ccaagaauauaugcuac

SEQ ID NO: 1232 - RNA, 17 nt, Homo sapiens
aagaauauaugcuacag

SEQ ID NO: 1233 - RNA, 17 nt, Homo sapiens
uauaugcuacagauaua

SEQ ID NO: 1234 - RNA, 17 nt, Homo sapiens
cuacagauauaagacag

SEQ ID NO: 1235 - RNA, 17 nt, Homo sapiens
acagauauaagacagac

SEQ ID NO: 1236 - RNA, 17 nt, Homo sapiens
gacaugguuugguccua

SEQ ID NO: 1237 - RNA, 17 nt, Homo sapiens
acaugguuugguccuau

SEQ ID NO: 1238 - RNA, 17 nt, Homo sapiens
gguuugguccuauauuu

SEQ ID NO: 1239 - RNA, 17 nt, Homo sapiens
uugguccuauauuucua

SEQ ID NO: 1240 - RNA, 17 nt, Homo sapiens
gguccuauauuucuagu

SEQ ID NO: 1241 - RNA, 17 nt, Homo sapiens
uccuauauuucuaguca

SEQ ID NO: 1242 - RNA, 17 nt, Homo sapiens
ccuauauuucuagucau

SEQ ID NO: 1243 - RNA, 17 nt, Homo sapiens
cuauauuucuagucaug

SEQ ID NO: 1244 - RNA, 17 nt, Homo sapiens
auauuucuagucaugau

SEQ ID NO: 1245 - RNA, 17 nt, Homo sapiens
uuucuagucaugaugaa

SEQ ID NO: 1246 - RNA, 17 nt, Homo sapiens
augaauguauuuuguau

SEQ ID NO: 1247 - RNA, 17 nt, Homo sapiens
gaauguauuuuguauac

SEQ ID NO: 1248 - RNA, 17 nt, Homo sapiens
aauguauuuuguauacc

SEQ ID NO: 1249 - RNA, 17 nt, Homo sapiens
auguauuuuguauacca

SEQ ID NO: 1250 - RNA, 17 nt, Homo sapiens
uauuuuguauaccaucu

SEQ ID NO: 1251 - RNA, 17 nt, Homo sapiens
uuuuguauaccaucuuc

SEQ ID NO: 1252 - RNA, 17 nt, Homo sapiens
uauaccaucuucauaua

SEQ ID NO: 1253 - RNA, 17 nt, Homo sapiens
uaccaucuucauauaau

SEQ ID NO: 1254 - RNA, 17 nt, Homo sapiens
accaucuucauauaaua

SEQ ID NO: 1255 - RNA, 17 nt, Homo sapiens
aucuucauauaauauac

SEQ ID NO: 1256 - RNA, 17 nt, Homo sapiens
cuucauauaauauacuu

SEQ ID NO: 1257 - RNA, 17 nt, Homo sapiens
cauauaauauacuuaaa

SEQ ID NO: 1258 - RNA, 17 nt, Homo sapiens
uauaauauacuuaaaaa

SEQ ID NO: 1259 - RNA, 17 nt, Homo sapiens
aauauacuuaaaaauau

SEQ ID NO: 1260 - RNA, 17 nt, Homo sapiens
auauacuuaaaaauauu

SEQ ID NO: 1261 - RNA, 17 nt, Homo sapiens
uuaaaaauauuucuuaa

SEQ ID NO: 1262 - RNA, 17 nt, Homo sapiens
aaaaauauuucuuaauu

SEQ ID NO: 1263 - RNA, 17 nt, Homo sapiens
aaaauauuucuuaauug

SEQ ID NO: 1264 - RNA, 17 nt, Homo sapiens
aaauauuucuuaauugg

SEQ ID NO: 1265 - RNA, 17 nt, Homo sapiens
auauuucuuaauuggga

SEQ ID NO: 1266 - RNA, 17 nt, Homo sapiens
uauuucuuaauugggau

SEQ ID NO: 1267 - RNA, 17 nt, Homo sapiens
uucuuaauugggauuug

SEQ ID NO: 1268 - RNA, 17 nt, Homo sapiens
auugggauuuguaaucg

SEQ ID NO: 1269 - RNA, 17 nt, Homo sapiens
uugggauuuguaaucgu

SEQ ID NO: 1270 - RNA, 17 nt, Homo sapiens
ggauuuguaaucguacc

SEQ ID NO: 1271 - RNA, 17 nt, Homo sapiens
uuuguaaucguaccaac

SEQ ID NO: 1272 - RNA, 17 nt, Homo sapiens
guaaucguaccaacuua

SEQ ID NO: 1273 - RNA, 17 nt, Homo sapiens
uaccaacuuaauugaua

SEQ ID NO: 1274 - RNA, 17 nt, Homo sapiens
accaacuuaauugauaa

SEQ ID NO: 1275 - RNA, 17 nt, Homo sapiens
aacuuaauugauaaacu

SEQ ID NO: 1276 - RNA, 17 nt, Homo sapiens
uaauugauaaacuuggc

SEQ ID NO: 1277 - RNA, 17 nt, Homo sapiens
gauaaacuuggcaacug

SEQ ID NO: 1278 - RNA, 17 nt, Homo sapiens
caacugcuuuuauguuc

SEQ ID NO: 1279 - RNA, 17 nt, Homo sapiens
aacugcuuuuauguucu

SEQ ID NO: 1280 - RNA, 17 nt, Homo sapiens
acugcuuuuauguucug

SEQ ID NO: 1281 - RNA, 17 nt, Homo sapiens
cugcuuuuauguucugu

SEQ ID NO: 1282 - RNA, 17 nt, Homo sapiens
uuuuauguucugucucc

SEQ ID NO: 1283 - RNA, 17 nt, Homo sapiens
uuuauguucugucuccu

SEQ ID NO: 1284 - RNA, 17 nt, Homo sapiens
uguucugucuccuucca

SEQ ID NO: 1285 - RNA, 17 nt, Homo sapiens
uucugucuccuuccaua

SEQ ID NO: 1286 - RNA, 17 nt, Homo sapiens
ugucuccuuccauaaau

SEQ ID NO: 1287 - RNA, 17 nt, Homo sapiens
gucuccuuccauaaauu

SEQ ID NO: 1288 - RNA, 17 nt, Homo sapiens
ccuuccauaaauuuuuc

SEQ ID NO: 1289 - RNA, 17 nt, Homo sapiens
ccauaaauuuuucaaaa

SEQ ID NO: 1290 - RNA, 17 nt, Homo sapiens
cauaaauuuuucaaaau

SEQ ID NO: 1291 - RNA, 17 nt, Homo sapiens
auaaauuuuucaaaaua

SEQ ID NO: 1292 - RNA, 17 nt, Homo sapiens
uaaauuuuucaaaauac

SEQ ID NO: 1293 - RNA, 17 nt, Homo sapiens
aaauuuuucaaaauacu

SEQ ID NO: 1294 - RNA, 17 nt, Homo sapiens
uucaaaauacuaauuca

SEQ ID NO: 1295 - RNA, 17 nt, Homo sapiens
aaaauacuaauucaaca

SEQ ID NO: 1296 - RNA, 17 nt, Homo sapiens
auacuaauucaacaaag

SEQ ID NO: 1297 - RNA, 17 nt, Homo sapiens
uacuaauucaacaaaga

SEQ ID NO: 1298 - RNA, 17 nt, Homo sapiens
aaaaagcucuuuuuuuu

SEQ ID NO: 1299 - RNA, 17 nt, Homo sapiens
aaagcucuuuuuuuucc

SEQ ID NO: 1300 - RNA, 17 nt, Homo sapiens
aagcucuuuuuuuuccu

SEQ ID NO: 1301 - RNA, 17 nt, Homo sapiens
agcucuuuuuuuuccua

SEQ ID NO: 1302 - RNA, 17 nt, Homo sapiens
gcucuuuuuuuuccuaa

SEQ ID NO: 1303 - RNA, 17 nt, Homo sapiens
cucuuuuuuuuccuaaa

SEQ ID NO: 1304 - RNA, 17 nt, Homo sapiens
ucuuuuuuuuccuaaaa

SEQ ID NO: 1305 - RNA, 17 nt, Homo sapiens
cuuuuuuuuccuaaaau

SEQ ID NO: 1306 - RNA, 17 nt, Homo sapiens
uuuuuuuuccuaaaaua

SEQ ID NO: 1307 - RNA, 17 nt, Homo sapiens
uuuuuccuaaaauaaac

SEQ ID NO: 1308 - RNA, 17 nt, Homo sapiens
ccuaaaauaaacucaaa

SEQ ID NO: 1309 - RNA, 17 nt, Homo sapiens
aauaaacucaaauuuau

SEQ ID NO: 1310 - RNA, 17 nt, Homo sapiens
acucaaauuuauccuug

SEQ ID NO: 1311 - RNA, 17 nt, Homo sapiens
cucaaauuuauccuugu

SEQ ID NO: 1312 - RNA, 17 nt, Homo sapiens
ucaaauuuauccuuguu

SEQ ID NO: 1313 - RNA, 17 nt, Homo sapiens
aaauuuauccuuguuua

SEQ ID NO: 1314 - RNA, 17 nt, Homo sapiens
uuuauccuuguuuagag

SEQ ID NO: 1315 - RNA, 17 nt, Homo sapiens
auccuuguuuagagcag

SEQ ID NO: 1316 - RNA, 17 nt, Homo sapiens
uccuuguuuagagcaga

SEQ ID NO: 1317 - RNA, 17 nt, Homo sapiens
ccuuguuuagagcagag

SEQ ID NO: 1318 - RNA, 17 nt, Homo sapiens
agaaaaauuaagaaaaa

SEQ ID NO: 1319 - RNA, 17 nt, Homo sapiens
gaaaaauuaagaaaaac

SEQ ID NO: 1320 - RNA, 17 nt, Homo sapiens
gaaaaacuuugaaaugg

SEQ ID NO: 1321 - RNA, 17 nt, Homo sapiens
aaaaacuuugaaauggu

SEQ ID NO: 1322 - RNA, 17 nt, Homo sapiens
gaaauggucucaaaaaa

SEQ ID NO: 1323 - RNA, 17 nt, Homo sapiens
aauggucucaaaaaauu

SEQ ID NO: 1324 - RNA, 17 nt, Homo sapiens
caaaaaauugcuaaaua

SEQ ID NO: 1325 - RNA, 17 nt, Homo sapiens
aaauugcuaaauauuuu

SEQ ID NO: 1326 - RNA, 17 nt, Homo sapiens
ugcuaaauauuuucaau

SEQ ID NO: 1327 - RNA, 17 nt, Homo sapiens
cuaaauauuuucaaugg

SEQ ID NO: 1328 - RNA, 17 nt, Homo sapiens
uaaauauuuucaaugga

SEQ ID NO: 1329 - RNA, 17 nt, Homo sapiens
aaauauuuucaauggaa

SEQ ID NO: 1330 - RNA, 17 nt, Homo sapiens
aauauuuucaauggaaa

SEQ ID NO: 1331 - RNA, 17 nt, Homo sapiens
ggaaaacuaaauguuag

SEQ ID NO: 1332 - RNA, 17 nt, Homo sapiens
cuaaauguuaguuuagc

SEQ ID NO: 1333 - RNA, 17 nt, Homo sapiens
uaaauguuaguuuagcu

SEQ ID NO: 1334 - RNA, 17 nt, Homo sapiens
auguuaguuuagcugau

SEQ ID NO: 1335 - RNA, 17 nt, Homo sapiens
uguuaguuuagcugauu

SEQ ID NO: 1336 - RNA, 17 nt, Homo sapiens
guuaguuuagcugauug

SEQ ID NO: 1337 - RNA, 17 nt, Homo sapiens
uagcugauuguaugggg

SEQ ID NO: 1338 - RNA, 17 nt, Homo sapiens
cugauuguaugggguuu

SEQ ID NO: 1339 - RNA, 17 nt, Homo sapiens
uaugggguuuucgaacc

SEQ ID NO: 1340 - RNA, 17 nt, Homo sapiens
augggguuuucgaaccu

SEQ ID NO: 1341 - RNA, 17 nt, Homo sapiens
ugggguuuucgaaccuu

SEQ ID NO: 1342 - RNA, 17 nt, Homo sapiens
gggguuuucgaaccuuu

SEQ ID NO: 1343 - RNA, 17 nt, Homo sapiens
ucgaaccuuucacuuuu

SEQ ID NO: 1344 - RNA, 17 nt, Homo sapiens
cgaaccuuucacuuuuu

SEQ ID NO: 1345 - RNA, 17 nt, Homo sapiens
gaaccuuucacuuuuug

SEQ ID NO: 1346 - RNA, 17 nt, Homo sapiens
cuuucacuuuuuguuug

SEQ ID NO: 1347 - RNA, 17 nt, Homo sapiens
uuucacuuuuuguuugu

SEQ ID NO: 1348 - RNA, 17 nt, Homo sapiens
uucacuuuuuguuuguu

SEQ ID NO: 1349 - RNA, 17 nt, Homo sapiens
ucacuuuuuguuuguuu

SEQ ID NO: 1350 - RNA, 17 nt, Homo sapiens
cuuuuuguuuguuuuac

SEQ ID NO: 1351 - RNA, 17 nt, Homo sapiens
uuuuuguuuguuuuacc

SEQ ID NO: 1352 - RNA, 17 nt, Homo sapiens
uuguuuguuuuaccuau

SEQ ID NO: 1353 - RNA, 17 nt, Homo sapiens
uguuuguuuuaccuauu

SEQ ID NO: 1354 - RNA, 17 nt, Homo sapiens
guuuguuuuaccuauuu

SEQ ID NO: 1355 - RNA, 17 nt, Homo sapiens
uuuguuuuaccuauuuc

SEQ ID NO: 1356 - RNA, 17 nt, Homo sapiens
uuuuaccuauuucacaa

SEQ ID NO: 1357 - RNA, 17 nt, Homo sapiens
uuaccuauuucacaacu

SEQ ID NO: 1358 - RNA, 17 nt, Homo sapiens
uaccuauuucacaacug

SEQ ID NO: 1359 - RNA, 17 nt, Homo sapiens
accuauuucacaacugu

SEQ ID NO: 1360 - RNA, 17 nt, Homo sapiens
aacuguguaaauugcca

SEQ ID NO: 1361 - RNA, 17 nt, Homo sapiens
guguaaauugccaauaa

SEQ ID NO: 1362 - RNA, 17 nt, Homo sapiens
uugccaauaauuccugu

SEQ ID NO: 1363 - RNA, 17 nt, Homo sapiens
ccaauaauuccugucca

SEQ ID NO: 1364 - RNA, 17 nt, Homo sapiens
caauaauuccuguccau

SEQ ID NO: 1365 - RNA, 17 nt, Homo sapiens
auuccuguccaugaaaa

SEQ ID NO: 1366 - RNA, 17 nt, Homo sapiens
augcaaauuauccagug

SEQ ID NO: 1367 - RNA, 17 nt, Homo sapiens
ugcaaauuauccagugu

SEQ ID NO: 1368 - RNA, 17 nt, Homo sapiens
caaauuauccaguguag

SEQ ID NO: 1369 - RNA, 17 nt, Homo sapiens
uccaguguagauauauu

SEQ ID NO: 1370 - RNA, 17 nt, Homo sapiens
guguagauauauuugac

SEQ ID NO: 1371 - RNA, 17 nt, Homo sapiens
guagauauauuugacca

SEQ ID NO: 1372 - RNA, 17 nt, Homo sapiens
agauauauuugaccauc

SEQ ID NO: 1373 - RNA, 17 nt, Homo sapiens
gauauauuugaccauca

SEQ ID NO: 1374 - RNA, 17 nt, Homo sapiens
uugaccaucacccuaug

SEQ ID NO: 1375 - RNA, 17 nt, Homo sapiens
aucacccuauggauauu

SEQ ID NO: 1376 - RNA, 17 nt, Homo sapiens
cuauggauauuggcuag

SEQ ID NO: 1377 - RNA, 17 nt, Homo sapiens
auggauauuggcuaguu

SEQ ID NO: 1378 - RNA, 17 nt, Homo sapiens
uauuggcuaguuuugcc

SEQ ID NO: 1379 - RNA, 17 nt, Homo sapiens
uggcuaguuuugccuuu

SEQ ID NO: 1380 - RNA, 17 nt, Homo sapiens
ggcuaguuuugccuuua

SEQ ID NO: 1381 - RNA, 17 nt, Homo sapiens
gcuaguuuugccuuuau

SEQ ID NO: 1382 - RNA, 17 nt, Homo sapiens
uuuugccuuuauuaagc

SEQ ID NO: 1383 - RNA, 17 nt, Homo sapiens
uuugccuuuauuaagca

SEQ ID NO: 1384 - RNA, 17 nt, Homo sapiens
uugccuuuauuaagcaa

SEQ ID NO: 1385 - RNA, 17 nt, Homo sapiens
gccuuuauuaagcaaau

SEQ ID NO: 1386 - RNA, 17 nt, Homo sapiens
ccuuuauuaagcaaauu

SEQ ID NO: 1387 - RNA, 17 nt, Homo sapiens
aagcaaauucauuucag

SEQ ID NO: 1388 - RNA, 17 nt, Homo sapiens
agcaaauucauuucagc

SEQ ID NO: 1389 - RNA, 17 nt, Homo sapiens
aaauucauuucagccug

SEQ ID NO: 1390 - RNA, 17 nt, Homo sapiens
aauucauuucagccuga

SEQ ID NO: 1391 - RNA, 17 nt, Homo sapiens
auucauuucagccugaa

SEQ ID NO: 1392 - RNA, 17 nt, Homo sapiens
cugaaugucugccuaua

SEQ ID NO: 1393 - RNA, 17 nt, Homo sapiens
gucugccuauauauucu

SEQ ID NO: 1394 - RNA, 17 nt, Homo sapiens
cugccuauauauucucu

SEQ ID NO: 1395 - RNA, 17 nt, Homo sapiens
gccuauauauucucugc

SEQ ID NO: 1396 - RNA, 17 nt, Homo sapiens
cuauauauucucugcuc

SEQ ID NO: 1397 - RNA, 17 nt, Homo sapiens
uauauauucucugcucu

SEQ ID NO: 1398 - RNA, 17 nt, Homo sapiens
uauauucucugcucuuu

SEQ ID NO: 1399 - RNA, 17 nt, Homo sapiens
ucucugcucuuuguauu

SEQ ID NO: 1400 - RNA, 17 nt, Homo sapiens
ucugcucuuuguauucu

SEQ ID NO: 1401 - RNA, 17 nt, Homo sapiens
cugcucuuuguauucuc

SEQ ID NO: 1402 - RNA, 17 nt, Homo sapiens
cucuuuguauucuccuu

SEQ ID NO: 1403 - RNA, 17 nt, Homo sapiens
cuuuguauucuccuuug

SEQ ID NO: 1404 - RNA, 17 nt, Homo sapiens
uuuguauucuccuuuga

SEQ ID NO: 1405 - RNA, 17 nt, Homo sapiens
uguauucuccuuugaac

SEQ ID NO: 1406 - RNA, 17 nt, Homo sapiens
auucuccuuugaacccg

SEQ ID NO: 1407 - RNA, 17 nt, Homo sapiens
uucuccuuugaacccgu

SEQ ID NO: 1408 - RNA, 17 nt, Homo sapiens
gaacccguuaaaacauc

SEQ ID NO: 1409 - RNA, 17 nt, Homo sapiens
aacccguuaaaacaucc

SEQ ID NO: 1410 - RNA, 17 nt, Homo sapiens
uaaaacauccuguggca

SEQ ID NO: 1411 - RNA, 18 nt, Homo sapiens
ccucucggcuccuccccg

SEQ ID NO: 1412 - RNA, 18 nt, Homo sapiens
ggcggcggcucggagcgg

SEQ ID NO: 1413 - RNA, 18 nt, Homo sapiens
gaggacggacucuggcgg

SEQ ID NO: 1414 - RNA, 18 nt, Homo sapiens
ucuggcggccgggucguu

SEQ ID NO: 1415 - RNA, 18 nt, Homo sapiens
ggguccugcugugcgcgc

SEQ ID NO: 1416 - RNA, 18 nt, Homo sapiens
gcgcgcugcucagcuguc

SEQ ID NO: 1417 - RNA, 18 nt, Homo sapiens
cugcucagcugucugcuu

SEQ ID NO: 1418 - RNA, 18 nt, Homo sapiens
cucagcugucugcuucuc

SEQ ID NO: 1419 - RNA, 18 nt, Homo sapiens
gcugucugcuucucacag

SEQ ID NO: 1420 - RNA, 18 nt, Homo sapiens
ggaagcagcccauaaaug

SEQ ID NO: 1421 - RNA, 18 nt, Homo sapiens
uaaaucugccuguggaag

SEQ ID NO: 1422 - RNA, 18 nt, Homo sapiens
gaacacagcucaagcaaa

SEQ ID NO: 1423 - RNA, 18 nt, Homo sapiens
uucuacagcugcaaauau

SEQ ID NO: 1424 - RNA, 18 nt, Homo sapiens
auucccugccggguuacg

SEQ ID NO: 1425 - RNA, 18 nt, Homo sapiens
gaucccugauggaaaacg

SEQ ID NO: 1426 - RNA, 18 nt, Homo sapiens
ggcuucugaccugugaag

SEQ ID NO: 1427 - RNA, 18 nt, Homo sapiens
uuacccugaugaaaaaaa

SEQ ID NO: 1428 - RNA, 18 nt, Homo sapiens
gcaagcggucuuaccggc

SEQ ID NO: 1429 - RNA, 18 nt, Homo sapiens
cuuaccggcucucuauga

SEQ ID NO: 1430 - RNA, 18 nt, Homo sapiens
gaaaucugcucgcuauuu

SEQ ID NO: 1431 - RNA, 18 nt, Homo sapiens
aaccccagauuuacgaaa

SEQ ID NO: 1432 - RNA, 18 nt, Homo sapiens
guuuccagacccggcucu

SEQ ID NO: 1433 - RNA, 18 nt, Homo sapiens
agacccggcucucuaccc

SEQ ID NO: 1434 - RNA, 18 nt, Homo sapiens
aaauccugacuuguaccg

SEQ ID NO: 1435 - RNA, 18 nt, Homo sapiens
uguggcugacucuagaau

SEQ ID NO: 1436 - RNA, 18 nt, Homo sapiens
uaucacagaugugccaaa

SEQ ID NO: 1437 - RNA, 18 nt, Homo sapiens
aaaugccgacggaaggag

SEQ ID NO: 1438 - RNA, 18 nt, Homo sapiens
ugaaacugucuugcacag

SEQ ID NO: 1439 - RNA, 18 nt, Homo sapiens
aucagcaguuccaccacu

SEQ ID NO: 1440 - RNA, 18 nt, Homo sapiens
agccucagaucacuuggu

SEQ ID NO: 1441 - RNA, 18 nt, Homo sapiens
gcacgcuguuuauugaaa

SEQ ID NO: 1442 - RNA, 18 nt, Homo sapiens
ccucacuguucaaggaac

SEQ ID NO: 1443 - RNA, 18 nt, Homo sapiens
uggagcugaucacucuaa

SEQ ID NO: 1444 - RNA, 18 nt, Homo sapiens
aaagacugacuaccuauc

SEQ ID NO: 1445 - RNA, 18 nt, Homo sapiens
ggacccagaugaaguucc

SEQ ID NO: 1446 - RNA, 18 nt, Homo sapiens
gugagcggcucccuuaug

SEQ ID NO: 1447 - RNA, 18 nt, Homo sapiens
cgugccggacuguggcug

SEQ ID NO: 1448 - RNA, 18 nt, Homo sapiens
aagcucugaugacugagc

SEQ ID NO: 1449 - RNA, 18 nt, Homo sapiens
uuaaccugcugggagccu

SEQ ID NO: 1450 - RNA, 18 nt, Homo sapiens
ggccucugauggugauug

SEQ ID NO: 1451 - RNA, 18 nt, Homo sapiens
agcuccggcuuucaggaa

SEQ ID NO: 1452 - RNA, 18 nt, Homo sapiens
ggauucugacgguuucua

SEQ ID NO: 1453 - RNA, 18 nt, Homo sapiens
ucugacgguuucuacaag

SEQ ID NO: 1454 - RNA, 18 nt, Homo sapiens
aagaucugauuucuuaca

SEQ ID NO: 1455 - RNA, 18 nt, Homo sapiens
ucuuacaguuuucaagug

SEQ ID NO: 1456 - RNA, 18 nt, Homo sapiens
aguuccugucuuccagaa

SEQ ID NO: 1457 - RNA, 18 nt, Homo sapiens
gaaccccgauuaugugag

SEQ ID NO: 1458 - RNA, 18 nt, Homo sapiens
uuuugcagucgccugagg

SEQ ID NO: 1459 - RNA, 18 nt, Homo sapiens
ucuaucagaucaugcugg

SEQ ID NO: 1460 - RNA, 18 nt, Homo sapiens
cuggacugcuggcacaga

SEQ ID NO: 1461 - RNA, 18 nt, Homo sapiens
aacuccugccuucucuga

SEQ ID NO: 1462 - RNA, 18 nt, Homo sapiens
uauuucagcuccgaaguu

SEQ ID NO: 1463 - RNA, 18 nt, Homo sapiens
aagcucugaugaugucag

SEQ ID NO: 1464 - RNA, 18 nt, Homo sapiens
gcacucuguuggccucuc

SEQ ID NO: 1465 - RNA, 18 nt, Homo sapiens
cggggcugucugauguca

SEQ ID NO: 1466 - RNA, 18 nt, Homo sapiens
gcugucugaugucagcag

SEQ ID NO: 1467 - RNA, 18 nt, Homo sapiens
aggcccaguuucugccau

SEQ ID NO: 1468 - RNA, 18 nt, Homo sapiens
cauuccagcugugggcac

SEQ ID NO: 1469 - RNA, 18 nt, Homo sapiens
gcgugcugcuccccgccc

SEQ ID NO: 1470 - RNA, 18 nt, Homo sapiens
gcuccccgcccccagacu

SEQ ID NO: 1471 - RNA, 18 nt, Homo sapiens
gcccccagacuacaacuc

SEQ ID NO: 1472 - RNA, 18 nt, Homo sapiens
ggagccagcugcuuuuug

SEQ ID NO: 1473 - RNA, 18 nt, Homo sapiens
gccagcugcuuuuuguga

SEQ ID NO: 1474 - RNA, 18 nt, Homo sapiens
cuucccugcuccaacccc

SEQ ID NO: 1475 - RNA, 18 nt, Homo sapiens
aggaccaguuugauugag

SEQ ID NO: 1476 - RNA, 18 nt, Homo sapiens
cugcacugaucacccaau

SEQ ID NO: 1477 - RNA, 18 nt, Homo sapiens
ugggccagcccugcagcc

SEQ ID NO: 1478 - RNA, 18 nt, Homo sapiens
cccugcagcccaaaaccc

SEQ ID NO: 1479 - RNA, 18 nt, Homo sapiens
cuucccagcucugacccu

SEQ ID NO: 1480 - RNA, 18 nt, Homo sapiens
cagcucugacccuucuac

SEQ ID NO: 1481 - RNA, 18 nt, Homo sapiens
aggagcagauggacagcg

SEQ ID NO: 1482 - RNA, 18 nt, Homo sapiens
uuauucuguuuugcacag

SEQ ID NO: 1483 - RNA, 18 nt, Homo sapiens
aaaugcaguccugaggag

SEQ ID NO: 1484 - RNA, 18 nt, Homo sapiens
gagggcugauggaggaaa

SEQ ID NO: 1485 - RNA, 18 nt, Homo sapiens
agaccccgucucuauacc

SEQ ID NO: 1486 - RNA, 18 nt, Homo sapiens
caacacaguugggaccca

SEQ ID NO: 1487 - RNA, 18 nt, Homo sapiens
uucuccaguugggacuca

SEQ ID NO: 1488 - RNA, 18 nt, Homo sapiens
uucaacugcuuugaaacu

SEQ ID NO: 1489 - RNA, 18 nt, Homo sapiens
uggcucuguuugaugcua

SEQ ID NO: 1490 - RNA, 18 nt, Homo sapiens
gauugcugcuucuugggg

SEQ ID NO: 1491 - RNA, 18 nt, Homo sapiens
ugccucuguucuuaugug

SEQ ID NO: 1492 - RNA, 18 nt, Homo sapiens
ggcagcggcuuuugugga

SEQ ID NO: 1493 - RNA, 18 nt, Homo sapiens
ugggacaguccucuccac

SEQ ID NO: 1494 - RNA, 18 nt, Homo sapiens
ugugacagcuggcaauuu

SEQ ID NO: 1495 - RNA, 18 nt, Homo sapiens
cuuagcuguucaugucuu

SEQ ID NO: 1496 - RNA, 18 nt, Homo sapiens
uuacucagcuccuucaaa

SEQ ID NO: 1497 - RNA, 18 nt, Homo sapiens
uggaacagucugggugga

SEQ ID NO: 1498 - RNA, 18 nt, Homo sapiens
cuugucaguccaagaagu

SEQ ID NO: 1499 - RNA, 18 nt, Homo sapiens
ggcaacugcuuuuauguu

SEQ ID NO: 1500 - RNA, 18 nt, Homo sapiens
auguucugucuccuucca

SEQ ID NO: 1501 - RNA, 18 nt, Homo sapiens
uuuagcugauuguauggg

SEQ ID NO: 1502 - RNA, 18 nt, Homo sapiens
aauuccuguccaugaaaa

SEQ ID NO: 1503 - RNA, 18 nt, Homo sapiens
cauuucagccugaauguc

SEQ ID NO: 1504 - RNA, 18 nt, Homo sapiens
aaugucugccuauauauu

SEQ ID NO: 1505 - RNA, 18 nt, Homo sapiens
auucucugcucuuuguau

SEQ ID NO: 1506 - RNA, 17 nt, Homo sapiens
cuggccgucgcccugug

SEQ ID NO: 1507 - RNA, 17 nt, Homo sapiens
cuguggcucugcgugga

SEQ ID NO: 1508 - RNA, 17 nt, Homo sapiens
ggccgccucuguggguu

SEQ ID NO: 1509 - RNA, 17 nt, Homo sapiens
cuguggguuugccuagu

SEQ ID NO: 1510 - RNA, 17 nt, Homo sapiens
uguggguuugccuagug

SEQ ID NO: 1511 - RNA, 17 nt, Homo sapiens
guuugccuaguguuucu

SEQ ID NO: 1512 - RNA, 17 nt, Homo sapiens
ccuaguguuucucuuga

SEQ ID NO: 1513 - RNA, 17 nt, Homo sapiens
cuaguguuucucuugau

SEQ ID NO: 1514 - RNA, 17 nt, Homo sapiens
uaguguuucucuugauc

SEQ ID NO: 1515 - RNA, 17 nt, Homo sapiens
guguuucucuugaucug

SEQ ID NO: 1516 - RNA, 17 nt, Homo sapiens
guuucucuugaucugcc

SEQ ID NO: 1517 - RNA, 17 nt, Homo sapiens
cucuugaucugcccagg

SEQ ID NO: 1518 - RNA, 17 nt, Homo sapiens
cccaggcucagcauaca

SEQ ID NO: 1519 - RNA, 17 nt, Homo sapiens
cucagcauacaaaaaga

SEQ ID NO: 1520 - RNA, 17 nt, Homo sapiens
aaagacauacuuacaau

SEQ ID NO: 1521 - RNA, 17 nt, Homo sapiens
gacauacuuacaauuaa

SEQ ID NO: 1522 - RNA, 17 nt, Homo sapiens
acauacuuacaauuaag

SEQ ID NO: 1523 - RNA, 17 nt, Homo sapiens
cuuacaauuaaggcuaa

SEQ ID NO: 1524 - RNA, 17 nt, Homo sapiens
uuacaauuaaggcuaau

SEQ ID NO: 1525 - RNA, 17 nt, Homo sapiens
uuaaggcuaauacaacu

SEQ ID NO: 1526 - RNA, 17 nt, Homo sapiens
aggcuaauacaacucuu

SEQ ID NO: 1527 - RNA, 17 nt, Homo sapiens
auacaacucuucaaauu

SEQ ID NO: 1528 - RNA, 17 nt, Homo sapiens
acaacucuucaaauuac

SEQ ID NO: 1529 - RNA, 17 nt, Homo sapiens
caacucuucaaauuacu

SEQ ID NO: 1530 - RNA, 17 nt, Homo sapiens
cuucaaauuacuugcag

SEQ ID NO: 1531 - RNA, 17 nt, Homo sapiens
uucaaauuacuugcagg

SEQ ID NO: 1532 - RNA, 17 nt, Homo sapiens
aaauuacuugcagggga

SEQ ID NO: 1533 - RNA, 17 nt, Homo sapiens
gagggacuuggacuggc

SEQ ID NO: 1534 - RNA, 17 nt, Homo sapiens
gacuggcuuuggcccaa

SEQ ID NO: 1535 - RNA, 17 nt, Homo sapiens
acuggcuuuggcccaau

SEQ ID NO: 1536 - RNA, 17 nt, Homo sapiens
ggcccaauaaucagagu

SEQ ID NO: 1537 - RNA, 17 nt, Homo sapiens
ccaauaaucagaguggc

SEQ ID NO: 1538 - RNA, 17 nt, Homo sapiens
gauggccucuucuguaa

SEQ ID NO: 1539 - RNA, 17 nt, Homo sapiens
uggccucuucuguaaga

SEQ ID NO: 1540 - RNA, 17 nt, Homo sapiens
ggccucuucuguaagac

SEQ ID NO: 1541 - RNA, 17 nt, Homo sapiens
ucuucuguaagacacuc

SEQ ID NO: 1542 - RNA, 17 nt, Homo sapiens
aagacacucacaauucc

SEQ ID NO: 1543 - RNA, 17 nt, Homo sapiens
cucacaauuccaaaagu

SEQ ID NO: 1544 - RNA, 17 nt, Homo sapiens
ucacaauuccaaaagug

SEQ ID NO: 1545 - RNA, 17 nt, Homo sapiens
aaagugaucggaaauga

SEQ ID NO: 1546 - RNA, 17 nt, Homo sapiens
uggagccuacaagugcu

SEQ ID NO: 1547 - RNA, 17 nt, Homo sapiens
caagugcuucuaccggg

SEQ ID NO: 1548 - RNA, 17 nt, Homo sapiens
aagugcuucuaccggga

SEQ ID NO: 1549 - RNA, 17 nt, Homo sapiens
gugcuucuaccgggaaa

SEQ ID NO: 1550 - RNA, 17 nt, Homo sapiens
aacugacuuggccucgg

SEQ ID NO: 1551 - RNA, 17 nt, Homo sapiens
cuuggccucggucauuu

SEQ ID NO: 1552 - RNA, 17 nt, Homo sapiens
gccucggucauuuaugu

SEQ ID NO: 1553 - RNA, 17 nt, Homo sapiens
ucggucauuuaugucua

SEQ ID NO: 1554 - RNA, 17 nt, Homo sapiens
cggucauuuaugucuau

SEQ ID NO: 1555 - RNA, 17 nt, Homo sapiens
ggucauuuaugucuaug

SEQ ID NO: 1556 - RNA, 17 nt, Homo sapiens
auuuaugucuauguuca

SEQ ID NO: 1557 - RNA, 17 nt, Homo sapiens
uuaugucuauguucaag

SEQ ID NO: 1558 - RNA, 17 nt, Homo sapiens
gucuauguucaagauua

SEQ ID NO: 1559 - RNA, 17 nt, Homo sapiens
ucuauguucaagauuac

SEQ ID NO: 1560 - RNA, 17 nt, Homo sapiens
uucaagauuacagaucu

SEQ ID NO: 1561 - RNA, 17 nt, Homo sapiens
ucaagauuacagaucuc

SEQ ID NO: 1562 - RNA, 17 nt, Homo sapiens
uuacagaucuccauuua

SEQ ID NO: 1563 - RNA, 17 nt, Homo sapiens
acagaucuccauuuauu

SEQ ID NO: 1564 - RNA, 17 nt, Homo sapiens
aucuccauuuauugcuu

SEQ ID NO: 1565 - RNA, 17 nt, Homo sapiens
ucuccauuuauugcuuc

SEQ ID NO: 1566 - RNA, 17 nt, Homo sapiens
cuccauuuauugcuucu

SEQ ID NO: 1567 - RNA, 17 nt, Homo sapiens
ccauuuauugcuucugu

SEQ ID NO: 1568 - RNA, 17 nt, Homo sapiens
uuauugcuucuguuagu

SEQ ID NO: 1569 - RNA, 17 nt, Homo sapiens
uauugcuucuguuagug

SEQ ID NO: 1570 - RNA, 17 nt, Homo sapiens
gcuucuguuagugacca

SEQ ID NO: 1571 - RNA, 17 nt, Homo sapiens
cuucuguuagugaccaa

SEQ ID NO: 1572 - RNA, 17 nt, Homo sapiens
cauggagucguguacau

SEQ ID NO: 1573 - RNA, 17 nt, Homo sapiens
agucguguacauuacug

SEQ ID NO: 1574 - RNA, 17 nt, Homo sapiens
guguacauuacugagaa

SEQ ID NO: 1575 - RNA, 17 nt, Homo sapiens
uguacauuacugagaac

SEQ ID NO: 1576 - RNA, 17 nt, Homo sapiens
guggugauuccaugucu

SEQ ID NO: 1577 - RNA, 17 nt, Homo sapiens
uggugauuccaugucuc

SEQ ID NO: 1578 - RNA, 17 nt, Homo sapiens
uuccaugucucgggucc

SEQ ID NO: 1579 - RNA, 17 nt, Homo sapiens
ccaugucucggguccau

SEQ ID NO: 1580 - RNA, 17 nt, Homo sapiens
ucucggguccauuucaa

SEQ ID NO: 1581 - RNA, 17 nt, Homo sapiens
ggguccauuucaaaucu

SEQ ID NO: 1582 - RNA, 17 nt, Homo sapiens
gguccauuucaaaucuc

SEQ ID NO: 1583 - RNA, 17 nt, Homo sapiens
guccauuucaaaucuca

SEQ ID NO: 1584 - RNA, 17 nt, Homo sapiens
uuucaaaucucaacgug

SEQ ID NO: 1585 - RNA, 17 nt, Homo sapiens
ucaaaucucaacguguc

SEQ ID NO: 1586 - RNA, 17 nt, Homo sapiens
caacgugucacuuugug

SEQ ID NO: 1587 - RNA, 17 nt, Homo sapiens
gugucacuuugugcaag

SEQ ID NO: 1588 - RNA, 17 nt, Homo sapiens
ugucacuuugugcaaga

SEQ ID NO: 1589 - RNA, 17 nt, Homo sapiens
ugcaagauacccagaaa

SEQ ID NO: 1590 - RNA, 17 nt, Homo sapiens
aaagagauuuguuccug

SEQ ID NO: 1591 - RNA, 17 nt, Homo sapiens
aagagauuuguuccuga

SEQ ID NO: 1592 - RNA, 17 nt, Homo sapiens
agauuuguuccugaugg

SEQ ID NO: 1593 - RNA, 17 nt, Homo sapiens
gauuuguuccugauggu

SEQ ID NO: 1594 - RNA, 17 nt, Homo sapiens
cugaugguaacagaauu

SEQ ID NO: 1595 - RNA, 17 nt, Homo sapiens
aacagaauuuccuggga

SEQ ID NO: 1596 - RNA, 17 nt, Homo sapiens
acagaauuuccugggac

SEQ ID NO: 1597 - RNA, 17 nt, Homo sapiens
cagaauuuccugggaca

SEQ ID NO: 1598 - RNA, 17 nt, Homo sapiens
gaagggcuuuacuauuc

SEQ ID NO: 1599 - RNA, 17 nt, Homo sapiens
aagggcuuuacuauucc

SEQ ID NO: 1600 - RNA, 17 nt, Homo sapiens
agggcuuuacuauuccc

SEQ ID NO: 1601 - RNA, 17 nt, Homo sapiens
gcuuuacuauucccagc

SEQ ID NO: 1602 - RNA, 17 nt, Homo sapiens
uuuacuauucccagcua

SEQ ID NO: 1603 - RNA, 17 nt, Homo sapiens
uuacuauucccagcuac

SEQ ID NO: 1604 - RNA, 17 nt, Homo sapiens
ucccagcuacaugauca

SEQ ID NO: 1605 - RNA, 17 nt, Homo sapiens
uacaugaucagcuaugc

SEQ ID NO: 1606 - RNA, 17 nt, Homo sapiens
gaucagcuaugcuggca

SEQ ID NO: 1607 - RNA, 17 nt, Homo sapiens
ggcauggucuucuguga

SEQ ID NO: 1608 - RNA, 17 nt, Homo sapiens
cauggucuucugugaag

SEQ ID NO: 1609 - RNA, 17 nt, Homo sapiens
auggucuucugugaagc

SEQ ID NO: 1610 - RNA, 17 nt, Homo sapiens
gcaaaaauuaaugauga

SEQ ID NO: 1611 - RNA, 17 nt, Homo sapiens
caaaaauuaaugaugaa

SEQ ID NO: 1612 - RNA, 17 nt, Homo sapiens
augaaaguuaccagucu

SEQ ID NO: 1613 - RNA, 17 nt, Homo sapiens
ugaaaguuaccagucua

SEQ ID NO: 1614 - RNA, 17 nt, Homo sapiens
uuaccagucuauuaugu

SEQ ID NO: 1615 - RNA, 17 nt, Homo sapiens
accagucuauuauguac

SEQ ID NO: 1616 - RNA, 17 nt, Homo sapiens
cagucuauuauguacau

SEQ ID NO: 1617 - RNA, 17 nt, Homo sapiens
agucuauuauguacaua

SEQ ID NO: 1618 - RNA, 17 nt, Homo sapiens
uauuauguacauaguug

SEQ ID NO: 1619 - RNA, 17 nt, Homo sapiens
auguacauaguugucgu

SEQ ID NO: 1620 - RNA, 17 nt, Homo sapiens
uacauaguugucguugu

SEQ ID NO: 1621 - RNA, 17 nt, Homo sapiens
auaguugucguuguagg

SEQ ID NO: 1622 - RNA, 17 nt, Homo sapiens
guugucguuguagggua

SEQ ID NO: 1623 - RNA, 17 nt, Homo sapiens
gucguuguaggguauag

SEQ ID NO: 1624 - RNA, 17 nt, Homo sapiens
uguaggguauaggauuu

SEQ ID NO: 1625 - RNA, 17 nt, Homo sapiens
uaggguauaggauuuau

SEQ ID NO: 1626 - RNA, 17 nt, Homo sapiens
uauaggauuuaugaugu

SEQ ID NO: 1627 - RNA, 17 nt, Homo sapiens
auaggauuuaugaugug

SEQ ID NO: 1628 - RNA, 17 nt, Homo sapiens
uaggauuuaugaugugg

SEQ ID NO: 1629 - RNA, 17 nt, Homo sapiens
gaugugguucugagucc

SEQ ID NO: 1630 - RNA, 17 nt, Homo sapiens
augugguucugaguccg

SEQ ID NO: 1631 - RNA, 17 nt, Homo sapiens
uucugaguccgucucau

SEQ ID NO: 1632 - RNA, 17 nt, Homo sapiens
gaguccgucucauggaa

SEQ ID NO: 1633 - RNA, 17 nt, Homo sapiens
guccgucucauggaauu

SEQ ID NO: 1634 - RNA, 17 nt, Homo sapiens
cauggaauugaacuauc

SEQ ID NO: 1635 - RNA, 17 nt, Homo sapiens
auugaacuaucuguugg

SEQ ID NO: 1636 - RNA, 17 nt, Homo sapiens
ugaacuaucuguuggag

SEQ ID NO: 1637 - RNA, 17 nt, Homo sapiens
cuaucuguuggagaaaa

SEQ ID NO: 1638 - RNA, 17 nt, Homo sapiens
gaaaagcuugucuuaaa

SEQ ID NO: 1639 - RNA, 17 nt, Homo sapiens
aagcuugucuuaaauug

SEQ ID NO: 1640 - RNA, 17 nt, Homo sapiens
gcuugucuuaaauugua

SEQ ID NO: 1641 - RNA, 17 nt, Homo sapiens
cuugucuuaaauuguac

SEQ ID NO: 1642 - RNA, 17 nt, Homo sapiens
ucuuaaauuguacagca

SEQ ID NO: 1643 - RNA, 17 nt, Homo sapiens
uaaauuguacagcaaga

SEQ ID NO: 1644 - RNA, 17 nt, Homo sapiens
acugaacuaaauguggg

SEQ ID NO: 1645 - RNA, 17 nt, Homo sapiens
guggggauugacuucaa

SEQ ID NO: 1646 - RNA, 17 nt, Homo sapiens
gauugacuucaacuggg

SEQ ID NO: 1647 - RNA, 17 nt, Homo sapiens
auugacuucaacuggga

SEQ ID NO: 1648 - RNA, 17 nt, Homo sapiens
cugggaauacccuucuu

SEQ ID NO: 1649 - RNA, 17 nt, Homo sapiens
aauacccuucuucgaag

SEQ ID NO: 1650 - RNA, 17 nt, Homo sapiens
auacccuucuucgaagc

SEQ ID NO: 1651 - RNA, 17 nt, Homo sapiens
acccuucuucgaagcau

SEQ ID NO: 1652 - RNA, 17 nt, Homo sapiens
cccuucuucgaagcauc

SEQ ID NO: 1653 - RNA, 17 nt, Homo sapiens
cgaagcaucagcauaag

SEQ ID NO: 1654 - RNA, 17 nt, Homo sapiens
aucagcauaagaaacuu

SEQ ID NO: 1655 - RNA, 17 nt, Homo sapiens
aagaaacuuguaaaccg

SEQ ID NO: 1656 - RNA, 17 nt, Homo sapiens
aaacuuguaaaccgaga

SEQ ID NO: 1657 - RNA, 17 nt, Homo sapiens
cgagaccuaaaaaccca

SEQ ID NO: 1658 - RNA, 17 nt, Homo sapiens
aacccagucugggagug

SEQ ID NO: 1659 - RNA, 17 nt, Homo sapiens
gaagaaauuuuugagca

SEQ ID NO: 1660 - RNA, 17 nt, Homo sapiens
aagaaauuuuugagcac

SEQ ID NO: 1661 - RNA, 17 nt, Homo sapiens
agaaauuuuugagcacc

SEQ ID NO: 1662 - RNA, 17 nt, Homo sapiens
gaaauuuuugagcaccu

SEQ ID NO: 1663 - RNA, 17 nt, Homo sapiens
gagcaccuuaacuauag

SEQ ID NO: 1664 - RNA, 17 nt, Homo sapiens
agcaccuuaacuauaga

SEQ ID NO: 1665 - RNA, 17 nt, Homo sapiens
ccuuaacuauagauggu

SEQ ID NO: 1666 - RNA, 17 nt, Homo sapiens
uuaacuauagauggugu

SEQ ID NO: 1667 - RNA, 17 nt, Homo sapiens
gaugguguaacccggag

SEQ ID NO: 1668 - RNA, 17 nt, Homo sapiens
ccaaggauuguacaccu

SEQ ID NO: 1669 - RNA, 17 nt, Homo sapiens
aggauuguacaccugug

SEQ ID NO: 1670 - RNA, 17 nt, Homo sapiens
ugcagcauccagugggc

SEQ ID NO: 1671 - RNA, 17 nt, Homo sapiens
cagcacauuugucaggg

SEQ ID NO: 1672 - RNA, 17 nt, Homo sapiens
agcacauuugucagggu

SEQ ID NO: 1673 - RNA, 17 nt, Homo sapiens
acauuugucagggucca

SEQ ID NO: 1674 - RNA, 17 nt, Homo sapiens
gucaggguccaugaaaa

SEQ ID NO: 1675 - RNA, 17 nt, Homo sapiens
aaaaaccuuuuguugcu

SEQ ID NO: 1676 - RNA, 17 nt, Homo sapiens
aaaaccuuuuguugcuu

SEQ ID NO: 1677 - RNA, 17 nt, Homo sapiens
aaaccuuuuguugcuuu

SEQ ID NO: 1678 - RNA, 17 nt, Homo sapiens
ccuuuuguugcuuuugg

SEQ ID NO: 1679 - RNA, 17 nt, Homo sapiens
uuguugcuuuuggaagu

SEQ ID NO: 1680 - RNA, 17 nt, Homo sapiens
uguugcuuuuggaagug

SEQ ID NO: 1681 - RNA, 17 nt, Homo sapiens
guugcuuuuggaagugg

SEQ ID NO: 1682 - RNA, 17 nt, Homo sapiens
cauggaaucucuggugg

SEQ ID NO: 1683 - RNA, 17 nt, Homo sapiens
uggaaucucugguggaa

SEQ ID NO: 1684 - RNA, 17 nt, Homo sapiens
gagcgugucagaauccc

SEQ ID NO: 1685 - RNA, 17 nt, Homo sapiens
gucagaaucccugcgaa

SEQ ID NO: 1686 - RNA, 17 nt, Homo sapiens
ugcgaaguaccuugguu

SEQ ID NO: 1687 - RNA, 17 nt, Homo sapiens
aaguaccuugguuaccc

SEQ ID NO: 1688 - RNA, 17 nt, Homo sapiens
accuugguuacccaccc

SEQ ID NO: 1689 - RNA, 17 nt, Homo sapiens
ccuugguuacccacccc

SEQ ID NO: 1690 - RNA, 17 nt, Homo sapiens
ccagaaauaaaauggua

SEQ ID NO: 1691 - RNA, 17 nt, Homo sapiens
aaaaugguauaaaaaug

SEQ ID NO: 1692 - RNA, 17 nt, Homo sapiens
aaugguauaaaaaugga

SEQ ID NO: 1693 - RNA, 17 nt, Homo sapiens
aauggaauaccccuuga

SEQ ID NO: 1694 - RNA, 17 nt, Homo sapiens
auaccccuugaguccaa

SEQ ID NO: 1695 - RNA, 17 nt, Homo sapiens
ccuugaguccaaucaca

SEQ ID NO: 1696 - RNA, 17 nt, Homo sapiens
aguccaaucacacaauu

SEQ ID NO: 1697 - RNA, 17 nt, Homo sapiens
cacacaauuaaagcggg

SEQ ID NO: 1698 - RNA, 17 nt, Homo sapiens
acacaauuaaagcgggg

SEQ ID NO: 1699 - RNA, 17 nt, Homo sapiens
gggcauguacugacgau

SEQ ID NO: 1700 - RNA, 17 nt, Homo sapiens
cugacgauuauggaagu

SEQ ID NO: 1701 - RNA, 17 nt, Homo sapiens
ugacgauuauggaagug

SEQ ID NO: 1702 - RNA, 17 nt, Homo sapiens
caggaaauuacacuguc

SEQ ID NO: 1703 - RNA, 17 nt, Homo sapiens
aggaaauuacacuguca

SEQ ID NO: 1704 - RNA, 17 nt, Homo sapiens
uacacugucauccuuac

SEQ ID NO: 1705 - RNA, 17 nt, Homo sapiens
acugucauccuuaccaa

SEQ ID NO: 1706 - RNA, 17 nt, Homo sapiens
gucauccuuaccaaucc

SEQ ID NO: 1707 - RNA, 17 nt, Homo sapiens
ucauccuuaccaauccc

SEQ ID NO: 1708 - RNA, 17 nt, Homo sapiens
uuaccaaucccauuuca

SEQ ID NO: 1709 - RNA, 17 nt, Homo sapiens
aaucccauuucaaagga

SEQ ID NO: 1710 - RNA, 17 nt, Homo sapiens
aucccauuucaaaggag

SEQ ID NO: 1711 - RNA, 17 nt, Homo sapiens
ucccauuucaaaggaga

SEQ ID NO: 1712 - RNA, 17 nt, Homo sapiens
cauguggucucucuggu

SEQ ID NO: 1713 - RNA, 17 nt, Homo sapiens
uguggucucucugguug

SEQ ID NO: 1714 - RNA, 17 nt, Homo sapiens
uggucucucugguugug

SEQ ID NO: 1715 - RNA, 17 nt, Homo sapiens
ucucugguuguguaugu

SEQ ID NO: 1716 - RNA, 17 nt, Homo sapiens
gguuguguaugucccac

SEQ ID NO: 1717 - RNA, 17 nt, Homo sapiens
guguaugucccacccca

SEQ ID NO: 1718 - RNA, 17 nt, Homo sapiens
ccccagauuggugagaa

SEQ ID NO: 1719 - RNA, 17 nt, Homo sapiens
ugagaaaucucuaaucu

SEQ ID NO: 1720 - RNA, 17 nt, Homo sapiens
agaaaucucuaaucucu

SEQ ID NO: 1721 - RNA, 17 nt, Homo sapiens
aaaucucuaaucucucc

SEQ ID NO: 1722 - RNA, 17 nt, Homo sapiens
ucucuaaucucuccugu

SEQ ID NO: 1723 - RNA, 17 nt, Homo sapiens
ucuaaucucuccugugg

SEQ ID NO: 1724 - RNA, 17 nt, Homo sapiens
uaaucucuccuguggau

SEQ ID NO: 1725 - RNA, 17 nt, Homo sapiens
cuguggauuccuaccag

SEQ ID NO: 1726 - RNA, 17 nt, Homo sapiens
uguggauuccuaccagu

SEQ ID NO: 1727 - RNA, 17 nt, Homo sapiens
ggauuccuaccaguacg

SEQ ID NO: 1728 - RNA, 17 nt, Homo sapiens
cuaccaguacggcacca

SEQ ID NO: 1729 - RNA, 17 nt, Homo sapiens
gcaccacucaaacgcug

SEQ ID NO: 1730 - RNA, 17 nt, Homo sapiens
ugacauguacggucuau

SEQ ID NO: 1731 - RNA, 17 nt, Homo sapiens
uguacggucuaugccau

SEQ ID NO: 1732 - RNA, 17 nt, Homo sapiens
uacggucuaugccauuc

SEQ ID NO: 1733 - RNA, 17 nt, Homo sapiens
uaugccauuccuccccc

SEQ ID NO: 1734 - RNA, 17 nt, Homo sapiens
augccauuccucccccg

SEQ ID NO: 1735 - RNA, 17 nt, Homo sapiens
ccauuccucccccgcau

SEQ ID NO: 1736 - RNA, 17 nt, Homo sapiens
ccccgcaucacauccac

SEQ ID NO: 1737 - RNA, 17 nt, Homo sapiens
caucacauccacuggua

SEQ ID NO: 1738 - RNA, 17 nt, Homo sapiens
ccacugguauuggcagu

SEQ ID NO: 1739 - RNA, 17 nt, Homo sapiens
acugguauuggcaguug

SEQ ID NO: 1740 - RNA, 17 nt, Homo sapiens
uuggcaguuggaggaag

SEQ ID NO: 1741 - RNA, 17 nt, Homo sapiens
caagcugucucagugac

SEQ ID NO: 1742 - RNA, 17 nt, Homo sapiens
agcugucucagugacaa

SEQ ID NO: 1743 - RNA, 17 nt, Homo sapiens
aaacccauacccuugug

SEQ ID NO: 1744 - RNA, 17 nt, Homo sapiens
cauacccuugugaagaa

SEQ ID NO: 1745 - RNA, 17 nt, Homo sapiens
ggaggacuuccagggag

SEQ ID NO: 1746 - RNA, 17 nt, Homo sapiens
gaggacuuccagggagg

SEQ ID NO: 1747 - RNA, 17 nt, Homo sapiens
gaggaaauaaaauugaa

SEQ ID NO: 1748 - RNA, 17 nt, Homo sapiens
aauaaaauugaaguuaa

SEQ ID NO: 1749 - RNA, 17 nt, Homo sapiens
auugaaguuaauaaaaa

SEQ ID NO: 1750 - RNA, 17 nt, Homo sapiens
uugaaguuaauaaaaau

SEQ ID NO: 1751 - RNA, 17 nt, Homo sapiens
aaguuaauaaaaaucaa

SEQ ID NO: 1752 - RNA, 17 nt, Homo sapiens
auaaaaaucaauuugcu

SEQ ID NO: 1753 - RNA, 17 nt, Homo sapiens
aaaucaauuugcucuaa

SEQ ID NO: 1754 - RNA, 17 nt, Homo sapiens
aaucaauuugcucuaau

SEQ ID NO: 1755 - RNA, 17 nt, Homo sapiens
aauuugcucuaauugaa

SEQ ID NO: 1756 - RNA, 17 nt, Homo sapiens
uuugcucuaauugaagg

SEQ ID NO: 1757 - RNA, 17 nt, Homo sapiens
gcucuaauugaaggaaa

SEQ ID NO: 1758 - RNA, 17 nt, Homo sapiens
aaaacuguaaguacccu

SEQ ID NO: 1759 - RNA, 17 nt, Homo sapiens
cuguaaguacccuuguu

SEQ ID NO: 1760 - RNA, 17 nt, Homo sapiens
aguacccuuguuaucca

SEQ ID NO: 1761 - RNA, 17 nt, Homo sapiens
acccuuguuauccaagc

SEQ ID NO: 1762 - RNA, 17 nt, Homo sapiens
cccuuguuauccaagcg

SEQ ID NO: 1763 - RNA, 17 nt, Homo sapiens
cuuguuauccaagcggc

SEQ ID NO: 1764 - RNA, 17 nt, Homo sapiens
aaaugugucagcuuugu

SEQ ID NO: 1765 - RNA, 17 nt, Homo sapiens
ugucagcuuuguacaaa

SEQ ID NO: 1766 - RNA, 17 nt, Homo sapiens
gucagcuuuguacaaau

SEQ ID NO: 1767 - RNA, 17 nt, Homo sapiens
agcuuuguacaaaugug

SEQ ID NO: 1768 - RNA, 17 nt, Homo sapiens
gaagcggucaacaaagu

SEQ ID NO: 1769 - RNA, 17 nt, Homo sapiens
aacaaagucgggagagg

SEQ ID NO: 1770 - RNA, 17 nt, Homo sapiens
agggugaucuccuucca

SEQ ID NO: 1771 - RNA, 17 nt, Homo sapiens
ggugaucuccuuccacg

SEQ ID NO: 1772 - RNA, 17 nt, Homo sapiens
gaucuccuuccacguga

SEQ ID NO: 1773 - RNA, 17 nt, Homo sapiens
aucuccuuccacgugac

SEQ ID NO: 1774 - RNA, 17 nt, Homo sapiens
ccagggguccugaaauu

SEQ ID NO: 1775 - RNA, 17 nt, Homo sapiens
ccugaaauuacuuugca

SEQ ID NO: 1776 - RNA, 17 nt, Homo sapiens
cugaaauuacuuugcaa

SEQ ID NO: 1777 - RNA, 17 nt, Homo sapiens
aaauuacuuugcaaccu

SEQ ID NO: 1778 - RNA, 17 nt, Homo sapiens
aauuacuuugcaaccug

SEQ ID NO: 1779 - RNA, 17 nt, Homo sapiens
gagcgugucuuuguggu

SEQ ID NO: 1780 - RNA, 17 nt, Homo sapiens
gcgugucuuuguggugc

SEQ ID NO: 1781 - RNA, 17 nt, Homo sapiens
cgugucuuuguggugca

SEQ ID NO: 1782 - RNA, 17 nt, Homo sapiens
agacagaucuacguuug

SEQ ID NO: 1783 - RNA, 17 nt, Homo sapiens
acagaucuacguuugag

SEQ ID NO: 1784 - RNA, 17 nt, Homo sapiens
aucuacguuugagaacc

SEQ ID NO: 1785 - RNA, 17 nt, Homo sapiens
ucuacguuugagaaccu

SEQ ID NO: 1786 - RNA, 17 nt, Homo sapiens
gagaaccucacauggua

SEQ ID NO: 1787 - RNA, 17 nt, Homo sapiens
cacaugguacaagcuug

SEQ ID NO: 1788 - RNA, 17 nt, Homo sapiens
uacaagcuuggcccaca

SEQ ID NO: 1789 - RNA, 17 nt, Homo sapiens
cacagccucugccaauc

SEQ ID NO: 1790 - RNA, 17 nt, Homo sapiens
cugccaauccauguggg

SEQ ID NO: 1791 - RNA, 17 nt, Homo sapiens
gggagaguugcccacac

SEQ ID NO: 1792 - RNA, 17 nt, Homo sapiens
acaccuguuugcaagaa

SEQ ID NO: 1793 - RNA, 17 nt, Homo sapiens
caccuguuugcaagaac

SEQ ID NO: 1794 - RNA, 17 nt, Homo sapiens
caagaacuuggauacuc

SEQ ID NO: 1795 - RNA, 17 nt, Homo sapiens
acuuggauacucuuugg

SEQ ID NO: 1796 - RNA, 17 nt, Homo sapiens
uggauacucuuuggaaa

SEQ ID NO: 1797 - RNA, 17 nt, Homo sapiens
gauacucuuuggaaauu

SEQ ID NO: 1798 - RNA, 17 nt, Homo sapiens
auacucuuuggaaauug

SEQ ID NO: 1799 - RNA, 17 nt, Homo sapiens
uuggaaauugaaugcca

SEQ ID NO: 1800 - RNA, 17 nt, Homo sapiens
caccauguucucuaaua

SEQ ID NO: 1801 - RNA, 17 nt, Homo sapiens
accauguucucuaauag

SEQ ID NO: 1802 - RNA, 17 nt, Homo sapiens
cauguucucuaauagca

SEQ ID NO: 1803 - RNA, 17 nt, Homo sapiens
uguucucuaauagcaca

SEQ ID NO: 1804 - RNA, 17 nt, Homo sapiens
ucucuaauagcacaaau

SEQ ID NO: 1805 - RNA, 17 nt, Homo sapiens
aaugacauuuugaucau

SEQ ID NO: 1806 - RNA, 17 nt, Homo sapiens
augacauuuugaucaug

SEQ ID NO: 1807 - RNA, 17 nt, Homo sapiens
ugacauuuugaucaugg

SEQ ID NO: 1808 - RNA, 17 nt, Homo sapiens
auuuugaucauggagcu

SEQ ID NO: 1809 - RNA, 17 nt, Homo sapiens
auggagcuuaagaaugc

SEQ ID NO: 1810 - RNA, 17 nt, Homo sapiens
uggagcuuaagaaugca

SEQ ID NO: 1811 - RNA, 17 nt, Homo sapiens
gaaugcauccuugcagg

SEQ ID NO: 1812 - RNA, 17 nt, Homo sapiens
ugcauccuugcaggacc

SEQ ID NO: 1813 - RNA, 17 nt, Homo sapiens
aggagacuaugucugcc

SEQ ID NO: 1814 - RNA, 17 nt, Homo sapiens
gacuaugucugccuugc

SEQ ID NO: 1815 - RNA, 17 nt, Homo sapiens
gucugccuugcucaaga

SEQ ID NO: 1816 - RNA, 17 nt, Homo sapiens
gccuugcucaagacagg

SEQ ID NO: 1817 - RNA, 17 nt, Homo sapiens
aaagacauugcgugguc

SEQ ID NO: 1818 - RNA, 17 nt, Homo sapiens
ugcguggucaggcagcu

SEQ ID NO: 1819 - RNA, 17 nt, Homo sapiens
aggcagcucacaguccu

SEQ ID NO: 1820 - RNA, 17 nt, Homo sapiens
cucacaguccuagagcg

SEQ ID NO: 1821 - RNA, 17 nt, Homo sapiens
acaguccuagagcgugu

SEQ ID NO: 1822 - RNA, 17 nt, Homo sapiens
cccacgaucacaggaaa

SEQ ID NO: 1823 - RNA, 17 nt, Homo sapiens
uggagaaucagacgaca

SEQ ID NO: 1824 - RNA, 17 nt, Homo sapiens
cgacaaguauuggggaa

SEQ ID NO: 1825 - RNA, 17 nt, Homo sapiens
acaaguauuggggaaag

SEQ ID NO: 1826 - RNA, 17 nt, Homo sapiens
gaaagcaucgaagucuc

SEQ ID NO: 1827 - RNA, 17 nt, Homo sapiens
aucgaagucucaugcac

SEQ ID NO: 1828 - RNA, 17 nt, Homo sapiens
cgaagucucaugcacgg

SEQ ID NO: 1829 - RNA, 17 nt, Homo sapiens
cacggcaucugggaauc

SEQ ID NO: 1830 - RNA, 17 nt, Homo sapiens
cugggaaucccccucca

SEQ ID NO: 1831 - RNA, 17 nt, Homo sapiens
aucccccuccacagauc

SEQ ID NO: 1832 - RNA, 17 nt, Homo sapiens
ccacagaucaugugguu

SEQ ID NO: 1833 - RNA, 17 nt, Homo sapiens
caugugguuuaaagaua

SEQ ID NO: 1834 - RNA, 17 nt, Homo sapiens
augugguuuaaagauaa

SEQ ID NO: 1835 - RNA, 17 nt, Homo sapiens
ugugguuuaaagauaau

SEQ ID NO: 1836 - RNA, 17 nt, Homo sapiens
uuaaagauaaugagacc

SEQ ID NO: 1837 - RNA, 17 nt, Homo sapiens
gagacccuuguagaaga

SEQ ID NO: 1838 - RNA, 17 nt, Homo sapiens
acccuuguagaagacuc

SEQ ID NO: 1839 - RNA, 17 nt, Homo sapiens
agaagacucaggcauug

SEQ ID NO: 1840 - RNA, 17 nt, Homo sapiens
ucaggcauuguauugaa

SEQ ID NO: 1841 - RNA, 17 nt, Homo sapiens
ggcauuguauugaagga

SEQ ID NO: 1842 - RNA, 17 nt, Homo sapiens
cauuguauugaaggaug

SEQ ID NO: 1843 - RNA, 17 nt, Homo sapiens
cggaaccucacuauccg

SEQ ID NO: 1844 - RNA, 17 nt, Homo sapiens
accucacuauccgcaga

SEQ ID NO: 1845 - RNA, 17 nt, Homo sapiens
cucacuauccgcagagu

SEQ ID NO: 1846 - RNA, 17 nt, Homo sapiens
gaaggccucuacaccug

SEQ ID NO: 1847 - RNA, 17 nt, Homo sapiens
aggccucuacaccugcc

SEQ ID NO: 1848 - RNA, 17 nt, Homo sapiens
ugcaguguucuuggcug

SEQ ID NO: 1849 - RNA, 17 nt, Homo sapiens
gcaguguucuuggcugu

SEQ ID NO: 1850 - RNA, 17 nt, Homo sapiens
aguguucuuggcugugc

SEQ ID NO: 1851 - RNA, 17 nt, Homo sapiens
ggaggcauuuuucauaa

SEQ ID NO: 1852 - RNA, 17 nt, Homo sapiens
gaggcauuuuucauaau

SEQ ID NO: 1853 - RNA, 17 nt, Homo sapiens
aggcauuuuucauaaua

SEQ ID NO: 1854 - RNA, 17 nt, Homo sapiens
ggcauuuuucauaauag

SEQ ID NO: 1855 - RNA, 17 nt, Homo sapiens
gcauuuuucauaauaga

SEQ ID NO: 1856 - RNA, 17 nt, Homo sapiens
uuuuucauaauagaagg

SEQ ID NO: 1857 - RNA, 17 nt, Homo sapiens
uucauaauagaaggugc

SEQ ID NO: 1858 - RNA, 17 nt, Homo sapiens
gacgaacuuggaaauca

SEQ ID NO: 1859 - RNA, 17 nt, Homo sapiens
uuggaaaucauuauucu

SEQ ID NO: 1860 - RNA, 17 nt, Homo sapiens
gaaaucauuauucuagu

SEQ ID NO: 1861 - RNA, 17 nt, Homo sapiens
aaaucauuauucuagua

SEQ ID NO: 1862 - RNA, 17 nt, Homo sapiens
aucauuauucuaguagg

SEQ ID NO: 1863 - RNA, 17 nt, Homo sapiens
ucauuauucuaguaggc

SEQ ID NO: 1864 - RNA, 17 nt, Homo sapiens
auuauucuaguaggcac

SEQ ID NO: 1865 - RNA, 17 nt, Homo sapiens
auucuaguaggcacgac

SEQ ID NO: 1866 - RNA, 17 nt, Homo sapiens
acggugauugccauguu

SEQ ID NO: 1867 - RNA, 17 nt, Homo sapiens
ugccauguucuucuggc

SEQ ID NO: 1868 - RNA, 17 nt, Homo sapiens
gccauguucuucuggcu

SEQ ID NO: 1869 - RNA, 17 nt, Homo sapiens
cauguucuucuggcuac

SEQ ID NO: 1870 - RNA, 17 nt, Homo sapiens
auguucuucuggcuacu

SEQ ID NO: 1871 - RNA, 17 nt, Homo sapiens
uucuggcuacuucuugu

SEQ ID NO: 1872 - RNA, 17 nt, Homo sapiens
uggcuacuucuugucau

SEQ ID NO: 1873 - RNA, 17 nt, Homo sapiens
ggcuacuucuugucauc

SEQ ID NO: 1874 - RNA, 17 nt, Homo sapiens
cuacuucuugucaucau

SEQ ID NO: 1875 - RNA, 17 nt, Homo sapiens
cuucuugucaucauccu

SEQ ID NO: 1876 - RNA, 17 nt, Homo sapiens
cuugucaucauccuagg

SEQ ID NO: 1877 - RNA, 17 nt, Homo sapiens
gucaucauccuagggac

SEQ ID NO: 1878 - RNA, 17 nt, Homo sapiens
aucauccuagggaccgu

SEQ ID NO: 1879 - RNA, 17 nt, Homo sapiens
gggaccguuaagcgggc

SEQ ID NO: 1880 - RNA, 17 nt, Homo sapiens
ggaccguuaagcgggcc

SEQ ID NO: 1881 - RNA, 17 nt, Homo sapiens
gacaggcuacuugucca

SEQ ID NO: 1882 - RNA, 17 nt, Homo sapiens
aggcuacuuguccaucg

SEQ ID NO: 1883 - RNA, 17 nt, Homo sapiens
cuacuuguccaucguca

SEQ ID NO: 1884 - RNA, 17 nt, Homo sapiens
uuguccaucgucaugga

SEQ ID NO: 1885 - RNA, 17 nt, Homo sapiens
uccaucgucauggaucc

SEQ ID NO: 1886 - RNA, 17 nt, Homo sapiens
ucauggauccagaugaa

SEQ ID NO: 1887 - RNA, 17 nt, Homo sapiens
gaugaacucccauugga

SEQ ID NO: 1888 - RNA, 17 nt, Homo sapiens
acucccauuggaugaac

SEQ ID NO: 1889 - RNA, 17 nt, Homo sapiens
augaacauugugaacga

SEQ ID NO: 1890 - RNA, 17 nt, Homo sapiens
gacugccuuaugaugcc

SEQ ID NO: 1891 - RNA, 17 nt, Homo sapiens
acugccuuaugaugcca

SEQ ID NO: 1892 - RNA, 17 nt, Homo sapiens
augggaauuccccagag

SEQ ID NO: 1893 - RNA, 17 nt, Homo sapiens
ugggaauuccccagaga

SEQ ID NO: 1894 - RNA, 17 nt, Homo sapiens
cugaaccuagguaagcc

SEQ ID NO: 1895 - RNA, 17 nt, Homo sapiens
accuagguaagccucuu

SEQ ID NO: 1896 - RNA, 17 nt, Homo sapiens
guaagccucuuggccgu

SEQ ID NO: 1897 - RNA, 17 nt, Homo sapiens
aagccucuuggccgugg

SEQ ID NO: 1898 - RNA, 17 nt, Homo sapiens
uggugccuuuggccaag

SEQ ID NO: 1899 - RNA, 17 nt, Homo sapiens
ggugccuuuggccaaga

SEQ ID NO: 1900 - RNA, 17 nt, Homo sapiens
caagagauugaagcaga

SEQ ID NO: 1901 - RNA, 17 nt, Homo sapiens
agaugccuuuggaauug

SEQ ID NO: 1902 - RNA, 17 nt, Homo sapiens
gaugccuuuggaauuga

SEQ ID NO: 1903 - RNA, 17 nt, Homo sapiens
uuuggaauugacaagac

SEQ ID NO: 1904 - RNA, 17 nt, Homo sapiens
cagcaacuugcaggaca

SEQ ID NO: 1905 - RNA, 17 nt, Homo sapiens
aggacaguagcagucaa

SEQ ID NO: 1906 - RNA, 17 nt, Homo sapiens
guagcagucaaaauguu

SEQ ID NO: 1907 - RNA, 17 nt, Homo sapiens
caaaauguugaaagaag

SEQ ID NO: 1908 - RNA, 17 nt, Homo sapiens
gugagcaucgagcucuc

SEQ ID NO: 1909 - RNA, 17 nt, Homo sapiens
aucgagcucucaugucu

SEQ ID NO: 1910 - RNA, 17 nt, Homo sapiens
cgagcucucaugucuga

SEQ ID NO: 1911 - RNA, 17 nt, Homo sapiens
ucucaugucugaacuca

SEQ ID NO: 1912 - RNA, 17 nt, Homo sapiens
ucugaacucaagauccu

SEQ ID NO: 1913 - RNA, 17 nt, Homo sapiens
cucaagauccucauuca

SEQ ID NO: 1914 - RNA, 17 nt, Homo sapiens
aagauccucauucauau

SEQ ID NO: 1915 - RNA, 17 nt, Homo sapiens
auccucauucauauugg

SEQ ID NO: 1916 - RNA, 17 nt, Homo sapiens
uccucauucauauuggu

SEQ ID NO: 1917 - RNA, 17 nt, Homo sapiens
ucauucauauuggucac

SEQ ID NO: 1918 - RNA, 17 nt, Homo sapiens
auucauauuggucacca

SEQ ID NO: 1919 - RNA, 17 nt, Homo sapiens
auauuggucaccaucuc

SEQ ID NO: 1920 - RNA, 17 nt, Homo sapiens
gucaccaucucaaugug

SEQ ID NO: 1921 - RNA, 17 nt, Homo sapiens
caccaucucaauguggu

SEQ ID NO: 1922 - RNA, 17 nt, Homo sapiens
aauguggucaaccuucu

SEQ ID NO: 1923 - RNA, 17 nt, Homo sapiens
gucaaccuucuaggugc

SEQ ID NO: 1924 - RNA, 17 nt, Homo sapiens
ucaaccuucuaggugcc

SEQ ID NO: 1925 - RNA, 17 nt, Homo sapiens
aaccuucuaggugccug

SEQ ID NO: 1926 - RNA, 17 nt, Homo sapiens
gugccuguaccaagcca

SEQ ID NO: 1927 - RNA, 17 nt, Homo sapiens
gggccacucauggugau

SEQ ID NO: 1928 - RNA, 17 nt, Homo sapiens
auggugauuguggaauu

SEQ ID NO: 1929 - RNA, 17 nt, Homo sapiens
uguggaauucugcaaau

SEQ ID NO: 1930 - RNA, 17 nt, Homo sapiens
guggaauucugcaaauu

SEQ ID NO: 1931 - RNA, 17 nt, Homo sapiens
cugcaaauuuggaaacc

SEQ ID NO: 1932 - RNA, 17 nt, Homo sapiens
ugcaaauuuggaaaccu

SEQ ID NO: 1933 - RNA, 17 nt, Homo sapiens
aaaccuguccacuuacc

SEQ ID NO: 1934 - RNA, 17 nt, Homo sapiens
uguccacuuaccugagg

SEQ ID NO: 1935 - RNA, 17 nt, Homo sapiens
guccacuuaccugagga

SEQ ID NO: 1936 - RNA, 17 nt, Homo sapiens
aaaugaauuuguccccu

SEQ ID NO: 1937 - RNA, 17 nt, Homo sapiens
aaugaauuuguccccua

SEQ ID NO: 1938 - RNA, 17 nt, Homo sapiens
gaauuuguccccuacaa

SEQ ID NO: 1939 - RNA, 17 nt, Homo sapiens
uguccccuacaagacca

SEQ ID NO: 1940 - RNA, 17 nt, Homo sapiens
ggcacgauuccgucaag

SEQ ID NO: 1941 - RNA, 17 nt, Homo sapiens
gcacgauuccgucaagg

SEQ ID NO: 1942 - RNA, 17 nt, Homo sapiens
gauuccgucaagggaaa

SEQ ID NO: 1943 - RNA, 17 nt, Homo sapiens
gaaagacuacguuggag

SEQ ID NO: 1944 - RNA, 17 nt, Homo sapiens
gacuacguuggagcaau

SEQ ID NO: 1945 - RNA, 17 nt, Homo sapiens
ggagcaaucccugugga

SEQ ID NO: 1946 - RNA, 17 nt, Homo sapiens
cuguggaucugaaacgg

SEQ ID NO: 1947 - RNA, 17 nt, Homo sapiens
acggcgcuuggacagca

SEQ ID NO: 1948 - RNA, 17 nt, Homo sapiens
gacagcaucaccaguag

SEQ ID NO: 1949 - RNA, 17 nt, Homo sapiens
ucaccaguagccagagc

SEQ ID NO: 1950 - RNA, 17 nt, Homo sapiens
ccagagcucagccagcu

SEQ ID NO: 1951 - RNA, 17 nt, Homo sapiens
agccagcucuggauuug

SEQ ID NO: 1952 - RNA, 17 nt, Homo sapiens
cucuggauuuguggagg

SEQ ID NO: 1953 - RNA, 17 nt, Homo sapiens
ucuggauuuguggagga

SEQ ID NO: 1954 - RNA, 17 nt, Homo sapiens
ggagaagucccucagug

SEQ ID NO: 1955 - RNA, 17 nt, Homo sapiens
aagucccucagugaugu

SEQ ID NO: 1956 - RNA, 17 nt, Homo sapiens
agugauguagaagaaga

SEQ ID NO: 1957 - RNA, 17 nt, Homo sapiens
aggaagcuccugaagau

SEQ ID NO: 1958 - RNA, 17 nt, Homo sapiens
cugaagaucuguauaag

SEQ ID NO: 1959 - RNA, 17 nt, Homo sapiens
agaucuguauaaggacu

SEQ ID NO: 1960 - RNA, 17 nt, Homo sapiens
aucuguauaaggacuuc

SEQ ID NO: 1961 - RNA, 17 nt, Homo sapiens
uaaggacuuccugaccu

SEQ ID NO: 1962 - RNA, 17 nt, Homo sapiens
aaggacuuccugaccuu

SEQ ID NO: 1963 - RNA, 17 nt, Homo sapiens
ccugaccuuggagcauc

SEQ ID NO: 1964 - RNA, 17 nt, Homo sapiens
uggagcaucucaucugu

SEQ ID NO: 1965 - RNA, 17 nt, Homo sapiens
gagcaucucaucuguua

SEQ ID NO: 1966 - RNA, 17 nt, Homo sapiens
caucucaucuguuacag

SEQ ID NO: 1967 - RNA, 17 nt, Homo sapiens
ucaucuguuacagcuuc

SEQ ID NO: 1968 - RNA, 17 nt, Homo sapiens
caucuguuacagcuucc

SEQ ID NO: 1969 - RNA, 17 nt, Homo sapiens
uuacagcuuccaagugg

SEQ ID NO: 1970 - RNA, 17 nt, Homo sapiens
uacagcuuccaaguggc

SEQ ID NO: 1971 - RNA, 17 nt, Homo sapiens
aaguggcuaagggcaug

SEQ ID NO: 1972 - RNA, 17 nt, Homo sapiens
cauggaguucuuggcau

SEQ ID NO: 1973 - RNA, 17 nt, Homo sapiens
auggaguucuuggcauc

SEQ ID NO: 1974 - RNA, 17 nt, Homo sapiens
ggaguucuuggcaucgc

SEQ ID NO: 1975 - RNA, 17 nt, Homo sapiens
cuuggcaucgcgaaagu

SEQ ID NO: 1976 - RNA, 17 nt, Homo sapiens
gaaaguguauccacagg

SEQ ID NO: 1977 - RNA, 17 nt, Homo sapiens
aaguguauccacaggga

SEQ ID NO: 1978 - RNA, 17 nt, Homo sapiens
cacgaaauauccucuua

SEQ ID NO: 1979 - RNA, 17 nt, Homo sapiens
cgaaauauccucuuauc

SEQ ID NO: 1980 - RNA, 17 nt, Homo sapiens
aauauccucuuaucgga

SEQ ID NO: 1981 - RNA, 17 nt, Homo sapiens
uauccucuuaucggaga

SEQ ID NO: 1982 - RNA, 17 nt, Homo sapiens
auccucuuaucggagaa

SEQ ID NO: 1983 - RNA, 17 nt, Homo sapiens
ccucuuaucggagaaga

SEQ ID NO: 1984 - RNA, 17 nt, Homo sapiens
aacgugguuaaaaucug

SEQ ID NO: 1985 - RNA, 17 nt, Homo sapiens
acgugguuaaaaucugu

SEQ ID NO: 1986 - RNA, 17 nt, Homo sapiens
guuaaaaucugugacuu

SEQ ID NO: 1987 - RNA, 17 nt, Homo sapiens
cugugacuuuggcuugg

SEQ ID NO: 1988 - RNA, 17 nt, Homo sapiens
ugugacuuuggcuuggc

SEQ ID NO: 1989 - RNA, 17 nt, Homo sapiens
cuuuggcuuggcccggg

SEQ ID NO: 1990 - RNA, 17 nt, Homo sapiens
cccgggauauuuauaaa

SEQ ID NO: 1991 - RNA, 17 nt, Homo sapiens
cgggauauuuauaaaga

SEQ ID NO: 1992 - RNA, 17 nt, Homo sapiens
gggauauuuauaaagau

SEQ ID NO: 1993 - RNA, 17 nt, Homo sapiens
ggauauuuauaaagauc

SEQ ID NO: 1994 - RNA, 17 nt, Homo sapiens
auauuuauaaagaucca

SEQ ID NO: 1995 - RNA, 17 nt, Homo sapiens
auaaagauccagauuau

SEQ ID NO: 1996 - RNA, 17 nt, Homo sapiens
auccagauuaugucaga

SEQ ID NO: 1997 - RNA, 17 nt, Homo sapiens
uccagauuaugucagaa

SEQ ID NO: 1998 - RNA, 17 nt, Homo sapiens
gauuaugucagaaaagg

SEQ ID NO: 1999 - RNA, 17 nt, Homo sapiens
gagaugcucgccucccu

SEQ ID NO: 2000 - RNA, 17 nt, Homo sapiens
gcucgccucccuuugaa

SEQ ID NO: 2001 - RNA, 17 nt, Homo sapiens
gccucccuuugaaaugg

SEQ ID NO: 2002 - RNA, 17 nt, Homo sapiens
ccucccuuugaaaugga

SEQ ID NO: 2003 - RNA, 17 nt, Homo sapiens
gaaacaauuuuugacag

SEQ ID NO: 2004 - RNA, 17 nt, Homo sapiens
aaacaauuuuugacaga

SEQ ID NO: 2005 - RNA, 17 nt, Homo sapiens
aacaauuuuugacagag

SEQ ID NO: 2006 - RNA, 17 nt, Homo sapiens
acaauuuuugacagagu

SEQ ID NO: 2007 - RNA, 17 nt, Homo sapiens
cagaguguacacaaucc

SEQ ID NO: 2008 - RNA, 17 nt, Homo sapiens
uacacaauccagaguga

SEQ ID NO: 2009 - RNA, 17 nt, Homo sapiens
agugacgucuggucuuu

SEQ ID NO: 2010 - RNA, 17 nt, Homo sapiens
cgucuggucuuuuggug

SEQ ID NO: 2011 - RNA, 17 nt, Homo sapiens
ucuggucuuuugguguu

SEQ ID NO: 2012 - RNA, 17 nt, Homo sapiens
cuggucuuuugguguuu

SEQ ID NO: 2013 - RNA, 17 nt, Homo sapiens
uggucuuuugguguuuu

SEQ ID NO: 2014 - RNA, 17 nt, Homo sapiens
uuugguguuuugcugug

SEQ ID NO: 2015 - RNA, 17 nt, Homo sapiens
uugguguuuugcugugg

SEQ ID NO: 2016 - RNA, 17 nt, Homo sapiens
ugguguuuugcuguggg

SEQ ID NO: 2017 - RNA, 17 nt, Homo sapiens
ugggaaauauuuuccuu

SEQ ID NO: 2018 - RNA, 17 nt, Homo sapiens
ggaaauauuuuccuuag

SEQ ID NO: 2019 - RNA, 17 nt, Homo sapiens
gaaauauuuuccuuagg

SEQ ID NO: 2020 - RNA, 17 nt, Homo sapiens
aaauauuuuccuuaggu

SEQ ID NO: 2021 - RNA, 17 nt, Homo sapiens
aauauuuuccuuaggug

SEQ ID NO: 2022 - RNA, 17 nt, Homo sapiens
auuuuccuuaggugcuu

SEQ ID NO: 2023 - RNA, 17 nt, Homo sapiens
uuuuccuuaggugcuuc

SEQ ID NO: 2024 - RNA, 17 nt, Homo sapiens
uaggugcuucuccauau

SEQ ID NO: 2025 - RNA, 17 nt, Homo sapiens
aggugcuucuccauauc

SEQ ID NO: 2026 - RNA, 17 nt, Homo sapiens
gugcuucuccauauccu

SEQ ID NO: 2027 - RNA, 17 nt, Homo sapiens
uucuccauauccugggg

SEQ ID NO: 2028 - RNA, 17 nt, Homo sapiens
cuccauauccuggggua

SEQ ID NO: 2029 - RNA, 17 nt, Homo sapiens
ccugggguaaagauuga

SEQ ID NO: 2030 - RNA, 17 nt, Homo sapiens
guaaagauugaugaaga

SEQ ID NO: 2031 - RNA, 17 nt, Homo sapiens
ugaagaauuuuguaggc

SEQ ID NO: 2032 - RNA, 17 nt, Homo sapiens
gaagaauuuuguaggcg

SEQ ID NO: 2033 - RNA, 17 nt, Homo sapiens
aagaauuuuguaggcga

SEQ ID NO: 2034 - RNA, 17 nt, Homo sapiens
aauuuuguaggcgauug

SEQ ID NO: 2035 - RNA, 17 nt, Homo sapiens
uaggcgauugaaagaag

SEQ ID NO: 2036 - RNA, 17 nt, Homo sapiens
aaggaacuagaaugagg

SEQ ID NO: 2037 - RNA, 17 nt, Homo sapiens
ccccugauuauacuaca

SEQ ID NO: 2038 - RNA, 17 nt, Homo sapiens
cccugauuauacuacac

SEQ ID NO: 2039 - RNA, 17 nt, Homo sapiens
cugauuauacuacacca

SEQ ID NO: 2040 - RNA, 17 nt, Homo sapiens
auuauacuacaccagaa

SEQ ID NO: 2041 - RNA, 17 nt, Homo sapiens
agaaauguaccagacca

SEQ ID NO: 2042 - RNA, 17 nt, Homo sapiens
agcccagucagagaccc

SEQ ID NO: 2043 - RNA, 17 nt, Homo sapiens
acccacguuuucagagu

SEQ ID NO: 2044 - RNA, 17 nt, Homo sapiens
cccacguuuucagaguu

SEQ ID NO: 2045 - RNA, 17 nt, Homo sapiens
ccacguuuucagaguug

SEQ ID NO: 2046 - RNA, 17 nt, Homo sapiens
cacguuuucagaguugg

SEQ ID NO: 2047 - RNA, 17 nt, Homo sapiens
uucagaguugguggaac

SEQ ID NO: 2048 - RNA, 17 nt, Homo sapiens
uggaacauuugggaaau

SEQ ID NO: 2049 - RNA, 17 nt, Homo sapiens
ggaacauuugggaaauc

SEQ ID NO: 2050 - RNA, 17 nt, Homo sapiens
ugggaaaucucuugcaa

SEQ ID NO: 2051 - RNA, 17 nt, Homo sapiens
ggaaaucucuugcaagc

SEQ ID NO: 2052 - RNA, 17 nt, Homo sapiens
aaaucucuugcaagcua

SEQ ID NO: 2053 - RNA, 17 nt, Homo sapiens
ugcaagcuaaugcucag

SEQ ID NO: 2054 - RNA, 17 nt, Homo sapiens
cuaaugcucagcaggau

SEQ ID NO: 2055 - RNA, 17 nt, Homo sapiens
caaagacuacauuguuc

SEQ ID NO: 2056 - RNA, 17 nt, Homo sapiens
gacuacauuguucuucc

SEQ ID NO: 2057 - RNA, 17 nt, Homo sapiens
uacauuguucuuccgau

SEQ ID NO: 2058 - RNA, 17 nt, Homo sapiens
acauuguucuuccgaua

SEQ ID NO: 2059 - RNA, 17 nt, Homo sapiens
auuguucuuccgauauc

SEQ ID NO: 2060 - RNA, 17 nt, Homo sapiens
uuguucuuccgauauca

SEQ ID NO: 2061 - RNA, 17 nt, Homo sapiens
cuuccgauaucagagac

SEQ ID NO: 2062 - RNA, 17 nt, Homo sapiens
uccgauaucagagacuu

SEQ ID NO: 2063 - RNA, 17 nt, Homo sapiens
cagagacuuugagcaug

SEQ ID NO: 2064 - RNA, 17 nt, Homo sapiens
agagacuuugagcaugg

SEQ ID NO: 2065 - RNA, 17 nt, Homo sapiens
aagaggauucuggacuc

SEQ ID NO: 2066 - RNA, 17 nt, Homo sapiens
agaggauucuggacucu

SEQ ID NO: 2067 - RNA, 17 nt, Homo sapiens
ucuggacucucucugcc

SEQ ID NO: 2068 - RNA, 17 nt, Homo sapiens
uggacucucucugccua

SEQ ID NO: 2069 - RNA, 17 nt, Homo sapiens
gacucucucugccuacc

SEQ ID NO: 2070 - RNA, 17 nt, Homo sapiens
cucugccuaccucaccu

SEQ ID NO: 2071 - RNA, 17 nt, Homo sapiens
gccuaccucaccuguuu

SEQ ID NO: 2072 - RNA, 17 nt, Homo sapiens
ucaccuguuuccuguau

SEQ ID NO: 2073 - RNA, 17 nt, Homo sapiens
caccuguuuccuguaug

SEQ ID NO: 2074 - RNA, 17 nt, Homo sapiens
accuguuuccuguaugg

SEQ ID NO: 2075 - RNA, 17 nt, Homo sapiens
uuuccuguauggaggag

SEQ ID NO: 2076 - RNA, 17 nt, Homo sapiens
gaggaaguaugugaccc

SEQ ID NO: 2077 - RNA, 17 nt, Homo sapiens
ccccaaauuccauuaug

SEQ ID NO: 2078 - RNA, 17 nt, Homo sapiens
cccaaauuccauuauga

SEQ ID NO: 2079 - RNA, 17 nt, Homo sapiens
aauuccauuaugacaac

SEQ ID NO: 2080 - RNA, 17 nt, Homo sapiens
auuccauuaugacaaca

SEQ ID NO: 2081 - RNA, 17 nt, Homo sapiens
gcaggaaucagucagua

SEQ ID NO: 2082 - RNA, 17 nt, Homo sapiens
gaaucagucaguaucug

SEQ ID NO: 2083 - RNA, 17 nt, Homo sapiens
cagucaguaucugcaga

SEQ ID NO: 2084 - RNA, 17 nt, Homo sapiens
gucaguaucugcagaac

SEQ ID NO: 2085 - RNA, 17 nt, Homo sapiens
agaacaguaagcgaaag

SEQ ID NO: 2086 - RNA, 17 nt, Homo sapiens
gugaguguaaaaacauu

SEQ ID NO: 2087 - RNA, 17 nt, Homo sapiens
aaaaacauuugaagaua

SEQ ID NO: 2088 - RNA, 17 nt, Homo sapiens
aaaacauuugaagauau

SEQ ID NO: 2089 - RNA, 17 nt, Homo sapiens
uugaagauaucccguua

SEQ ID NO: 2090 - RNA, 17 nt, Homo sapiens
gaagauaucccguuaga

SEQ ID NO: 2091 - RNA, 17 nt, Homo sapiens
uaucccguuagaagaac

SEQ ID NO: 2092 - RNA, 17 nt, Homo sapiens
aucccguuagaagaacc

SEQ ID NO: 2093 - RNA, 17 nt, Homo sapiens
ccagaaguaaaaguaau

SEQ ID NO: 2094 - RNA, 17 nt, Homo sapiens
guaaaaguaaucccaga

SEQ ID NO: 2095 - RNA, 17 nt, Homo sapiens
aaaguaaucccagauga

SEQ ID NO: 2096 - RNA, 17 nt, Homo sapiens
acagugguaugguucuu

SEQ ID NO: 2097 - RNA, 17 nt, Homo sapiens
gguaugguucuugccuc

SEQ ID NO: 2098 - RNA, 17 nt, Homo sapiens
guaugguucuugccuca

SEQ ID NO: 2099 - RNA, 17 nt, Homo sapiens
augguucuugccucaga

SEQ ID NO: 2100 - RNA, 17 nt, Homo sapiens
ucuugccucagaagagc

SEQ ID NO: 2101 - RNA, 17 nt, Homo sapiens
ugaaaacuuuggaagac

SEQ ID NO: 2102 - RNA, 17 nt, Homo sapiens
gaaaacuuuggaagaca

SEQ ID NO: 2103 - RNA, 17 nt, Homo sapiens
aaccaaauuaucuccau

SEQ ID NO: 2104 - RNA, 17 nt, Homo sapiens
accaaauuaucuccauc

SEQ ID NO: 2105 - RNA, 17 nt, Homo sapiens
caaauuaucuccaucuu

SEQ ID NO: 2106 - RNA, 17 nt, Homo sapiens
aauuaucuccaucuuuu

SEQ ID NO: 2107 - RNA, 17 nt, Homo sapiens
aucuccaucuuuuggug

SEQ ID NO: 2108 - RNA, 17 nt, Homo sapiens
cuccaucuuuuggugga

SEQ ID NO: 2109 - RNA, 17 nt, Homo sapiens
uccaucuuuugguggaa

SEQ ID NO: 2110 - RNA, 17 nt, Homo sapiens
ccaucuuuugguggaau

SEQ ID NO: 2111 - RNA, 17 nt, Homo sapiens
cagggagucuguggcau

SEQ ID NO: 2112 - RNA, 17 nt, Homo sapiens
uguggcaucugaaggcu

SEQ ID NO: 2113 - RNA, 17 nt, Homo sapiens
ugaaggcucaaaccaga

SEQ ID NO: 2114 - RNA, 17 nt, Homo sapiens
aagcggcuaccaguccg

SEQ ID NO: 2115 - RNA, 17 nt, Homo sapiens
cuaccaguccggauauc

SEQ ID NO: 2116 - RNA, 17 nt, Homo sapiens
guccggauaucacuccg

SEQ ID NO: 2117 - RNA, 17 nt, Homo sapiens
ccggauaucacuccgau

SEQ ID NO: 2118 - RNA, 17 nt, Homo sapiens
auaucacuccgaugaca

SEQ ID NO: 2119 - RNA, 17 nt, Homo sapiens
caccguguacuccagug

SEQ ID NO: 2120 - RNA, 17 nt, Homo sapiens
cguguacuccagugagg

SEQ ID NO: 2121 - RNA, 17 nt, Homo sapiens
gcagaacuuuuaaagcu

SEQ ID NO: 2122 - RNA, 17 nt, Homo sapiens
cagaacuuuuaaagcug

SEQ ID NO: 2123 - RNA, 17 nt, Homo sapiens
agaacuuuuaaagcuga

SEQ ID NO: 2124 - RNA, 17 nt, Homo sapiens
gaacuuuuaaagcugau

SEQ ID NO: 2125 - RNA, 17 nt, Homo sapiens
aagcugauagagauugg

SEQ ID NO: 2126 - RNA, 17 nt, Homo sapiens
auagagauuggagugca

SEQ ID NO: 2127 - RNA, 17 nt, Homo sapiens
aaaccgguagcacagcc

SEQ ID NO: 2128 - RNA, 17 nt, Homo sapiens
gcccagauucuccagcc

SEQ ID NO: 2129 - RNA, 17 nt, Homo sapiens
cccagauucuccagccu

SEQ ID NO: 2130 - RNA, 17 nt, Homo sapiens
cagauucuccagccuga

SEQ ID NO: 2131 - RNA, 17 nt, Homo sapiens
acugagcucuccuccug

SEQ ID NO: 2132 - RNA, 17 nt, Homo sapiens
ugagcucuccuccuguu

SEQ ID NO: 2133 - RNA, 17 nt, Homo sapiens
gcucuccuccuguuuaa

SEQ ID NO: 2134 - RNA, 17 nt, Homo sapiens
ccuccuguuuaaaagga

SEQ ID NO: 2135 - RNA, 17 nt, Homo sapiens
cuccuguuuaaaaggaa

SEQ ID NO: 2136 - RNA, 17 nt, Homo sapiens
uccuguuuaaaaggaag

SEQ ID NO: 2137 - RNA, 17 nt, Homo sapiens
ggaagcauccacacccc

SEQ ID NO: 2138 - RNA, 17 nt, Homo sapiens
ccccaacucccggacau

SEQ ID NO: 2139 - RNA, 17 nt, Homo sapiens
ccggacaucacaugaga

SEQ ID NO: 2140 - RNA, 17 nt, Homo sapiens
ugagaggucugcucaga

SEQ ID NO: 2141 - RNA, 17 nt, Homo sapiens
ggucugcucagauuuug

SEQ ID NO: 2142 - RNA, 17 nt, Homo sapiens
gcucagauuuugaagug

SEQ ID NO: 2143 - RNA, 17 nt, Homo sapiens
cucagauuuugaagugu

SEQ ID NO: 2144 - RNA, 17 nt, Homo sapiens
ucagauuuugaaguguu

SEQ ID NO: 2145 - RNA, 17 nt, Homo sapiens
ugaaguguuguucuuuc

SEQ ID NO: 2146 - RNA, 17 nt, Homo sapiens
aguguuguucuuuccac

SEQ ID NO: 2147 - RNA, 17 nt, Homo sapiens
guguuguucuuuccacc

SEQ ID NO: 2148 - RNA, 17 nt, Homo sapiens
guuguucuuuccaccag

SEQ ID NO: 2149 - RNA, 17 nt, Homo sapiens
uuguucuuuccaccagc

SEQ ID NO: 2150 - RNA, 17 nt, Homo sapiens
uguucuuuccaccagca

SEQ ID NO: 2151 - RNA, 17 nt, Homo sapiens
caggaaguagccgcauu

SEQ ID NO: 2152 - RNA, 17 nt, Homo sapiens
agccgcauuugauuuuc

SEQ ID NO: 2153 - RNA, 17 nt, Homo sapiens
gccgcauuugauuuuca

SEQ ID NO: 2154 - RNA, 17 nt, Homo sapiens
cauuugauuuucauuuc

SEQ ID NO: 2155 - RNA, 17 nt, Homo sapiens
auuugauuuucauuucg

SEQ ID NO: 2156 - RNA, 17 nt, Homo sapiens
uuugauuuucauuucga

SEQ ID NO: 2157 - RNA, 17 nt, Homo sapiens
uugauuuucauuucgac

SEQ ID NO: 2158 - RNA, 17 nt, Homo sapiens
auuuucauuucgacaac

SEQ ID NO: 2159 - RNA, 17 nt, Homo sapiens
uuuucauuucgacaaca

SEQ ID NO: 2160 - RNA, 17 nt, Homo sapiens
uuucauuucgacaacag

SEQ ID NO: 2161 - RNA, 17 nt, Homo sapiens
aaggaccucggacugca

SEQ ID NO: 2162 - RNA, 17 nt, Homo sapiens
agccagcucuucuaggc

SEQ ID NO: 2163 - RNA, 17 nt, Homo sapiens
ccagcucuucuaggcuu

SEQ ID NO: 2164 - RNA, 17 nt, Homo sapiens
cagcucuucuaggcuug

SEQ ID NO: 2165 - RNA, 17 nt, Homo sapiens
gcucuucuaggcuugug

SEQ ID NO: 2166 - RNA, 18 nt, Homo sapiens
aggugcugcuggccgucg

SEQ ID NO: 2167 - RNA, 18 nt, Homo sapiens
gcuggccgucgcccugug

SEQ ID NO: 2168 - RNA, 18 nt, Homo sapiens
ccgggccgccucuguggg

SEQ ID NO: 2169 - RNA, 18 nt, Homo sapiens
uugaucugcccaggcuca

SEQ ID NO: 2170 - RNA, 18 nt, Homo sapiens
ggaaacugacuuggccuc

SEQ ID NO: 2171 - RNA, 18 nt, Homo sapiens
gauuacagaucuccauuu

SEQ ID NO: 2172 - RNA, 18 nt, Homo sapiens
uguuccugaugguaacag

SEQ ID NO: 2173 - RNA, 18 nt, Homo sapiens
guuaccagucuauuaugu

SEQ ID NO: 2174 - RNA, 18 nt, Homo sapiens
ugaguccgucucauggaa

SEQ ID NO: 2175 - RNA, 18 nt, Homo sapiens
acuaucuguuggagaaaa

SEQ ID NO: 2176 - RNA, 18 nt, Homo sapiens
aaacccagucugggagug

SEQ ID NO: 2177 - RNA, 18 nt, Homo sapiens
gugggcugaugaccaaga

SEQ ID NO: 2178 - RNA, 18 nt, Homo sapiens
auguacugacgauuaugg

SEQ ID NO: 2179 - RNA, 18 nt, Homo sapiens
caccccagauuggugaga

SEQ ID NO: 2180 - RNA, 18 nt, Homo sapiens
auguacggucuaugccau

SEQ ID NO: 2181 - RNA, 18 nt, Homo sapiens
auuggcaguuggaggaag

SEQ ID NO: 2182 - RNA, 18 nt, Homo sapiens
ccaagcugucucagugac

SEQ ID NO: 2183 - RNA, 18 nt, Homo sapiens
ugugucagcuuuguacaa

SEQ ID NO: 2184 - RNA, 18 nt, Homo sapiens
acaugcagcccacugagc

SEQ ID NO: 2185 - RNA, 18 nt, Homo sapiens
gcagacagaucuacguuu

SEQ ID NO: 2186 - RNA, 18 nt, Homo sapiens
gcccacagccucugccaa

SEQ ID NO: 2187 - RNA, 18 nt, Homo sapiens
cacaccuguuugcaagaa

SEQ ID NO: 2188 - RNA, 18 nt, Homo sapiens
uaugucugccuugcucaa

SEQ ID NO: 2189 - RNA, 18 nt, Homo sapiens
ucaggcagcucacagucc

SEQ ID NO: 2190 - RNA, 18 nt, Homo sapiens
gcucacaguccuagagcg

SEQ ID NO: 2191 - RNA, 18 nt, Homo sapiens
agaaucagacgacaagua

SEQ ID NO: 2192 - RNA, 18 nt, Homo sapiens
cuccacagaucauguggu

SEQ ID NO: 2193 - RNA, 18 nt, Homo sapiens
ggauccagaugaacuccc

SEQ ID NO: 2194 - RNA, 18 nt, Homo sapiens
aacgacugccuuaugaug

SEQ ID NO: 2195 - RNA, 18 nt, Homo sapiens
gagaccggcugaaccuag

SEQ ID NO: 2196 - RNA, 18 nt, Homo sapiens
ugaagcagaugccuuugg

SEQ ID NO: 2197 - RNA, 18 nt, Homo sapiens
gaaaccuguccacuuacc

SEQ ID NO: 2198 - RNA, 18 nt, Homo sapiens
ucagccagcucuggauuu

SEQ ID NO: 2199 - RNA, 18 nt, Homo sapiens
acuuccugaccuuggagc

SEQ ID NO: 2200 - RNA, 18 nt, Homo sapiens
uguuacagcuuccaagug

SEQ ID NO: 2201 - RNA, 18 nt, Homo sapiens
agauccagauuaugucag

SEQ ID NO: 2202 - RNA, 18 nt, Homo sapiens
ggccccugauuauacuac

SEQ ID NO: 2203 - RNA, 18 nt, Homo sapiens
uguaccagaccaugcugg

SEQ ID NO: 2204 - RNA, 18 nt, Homo sapiens
cuggacugcuggcacggg

SEQ ID NO: 2205 - RNA, 18 nt, Homo sapiens
ucucucugccuaccucac

SEQ ID NO: 2206 - RNA, 18 nt, Homo sapiens
cucaccuguuuccuguau

SEQ ID NO: 2207 - RNA, 18 nt, Homo sapiens
agagccggccugugagug

SEQ ID NO: 2208 - RNA, 18 nt, Homo sapiens
aaucccagaugacaacca

SEQ ID NO: 2209 - RNA, 18 nt, Homo sapiens
acaaccagacggacagug

SEQ ID NO: 2210 - RNA, 18 nt, Homo sapiens
gcuaccaguccggauauc

SEQ ID NO: 2211 - RNA, 18 nt, Homo sapiens
ucacuccgaugacacaga

SEQ ID NO: 2212 - RNA, 18 nt, Homo sapiens
uagcacagcccagauucu

SEQ ID NO: 2213 - RNA, 18 nt, Homo sapiens
cagcccagauucuccagc

SEQ ID NO: 2214 - RNA, 18 nt, Homo sapiens
uucuccagccugacacgg

SEQ ID NO: 2215 - RNA, 18 nt, Homo sapiens
uccuccuguuuaaaagga

SEQ ID NO: 2216 - RNA, 18 nt, Homo sapiens
gaggucugcucagauuuu

SEQ ID NO: 2217 - RNA, 18 nt, Homo sapiens
cugcucagauuuugaagu

SEQ ID NO: 2218 - RNA, 18 nt, Homo sapiens
gaccucggacugcaggga

SEQ ID NO: 2219 - RNA, 18 nt, Homo sapiens
ggagccagcucuucuagg

SEQ ID NO: 2220 - RNA, 17 nt, Mus musculus
gggcgaauuggguacgg

SEQ ID NO: 2221 - RNA, 17 nt, Mus musculus
aauuggguacgggaccc

SEQ ID NO: 2222 - RNA, 17 nt, Mus musculus
accccccucgaggucga

SEQ ID NO: 2223 - RNA, 17 nt, Mus musculus
cucgaggucgacgguau

SEQ ID NO: 2224 - RNA, 17 nt, Mus musculus
ucgacgguaucgauaag

SEQ ID NO: 2225 - RNA, 17 nt, Mus musculus
gacgguaucgauaagcu

SEQ ID NO: 2226 - RNA, 17 nt, Mus musculus
guaucgauaagcuugau

SEQ ID NO: 2227 - RNA, 17 nt, Mus musculus
gauaagcuugauaucga

SEQ ID NO: 2228 - RNA, 17 nt, Mus musculus
agcuugauaucgaauuc

SEQ ID NO: 2229 - RNA, 17 nt, Mus musculus
cuugauaucgaauucgg

SEQ ID NO: 2230 - RNA, 17 nt, Mus musculus
uaucgaauucgggccca

SEQ ID NO: 2231 - RNA, 17 nt, Mus musculus
aucgaauucgggcccag

SEQ ID NO: 2232 - RNA, 17 nt, Mus musculus
gacugugucccgcagcc

SEQ ID NO: 2233 - RNA, 17 nt, Mus musculus
gccgggauaaccuggcu

SEQ ID NO: 2234 - RNA, 17 nt, Mus musculus
gacccgauuccgcggac

SEQ ID NO: 2235 - RNA, 17 nt, Mus musculus
acccgauuccgcggaca

SEQ ID NO: 2236 - RNA, 17 nt, Mus musculus
cccgcgcucuccccggu

SEQ ID NO: 2237 - RNA, 17 nt, Mus musculus
cgcgcucuccccggucu

SEQ ID NO: 2238 - RNA, 17 nt, Mus musculus
uccccggucuugcgcug

SEQ ID NO: 2239 - RNA, 17 nt, Mus musculus
cccggucuugcgcugcg

SEQ ID NO: 2240 - RNA, 17 nt, Mus musculus
ggggccauaccgccucu

SEQ ID NO: 2241 - RNA, 17 nt, Mus musculus
uaccgccucugugacuu

SEQ ID NO: 2242 - RNA, 17 nt, Mus musculus
cugugacuucuuugcgg

SEQ ID NO: 2243 - RNA, 17 nt, Mus musculus
ugugacuucuuugcggg

SEQ ID NO: 2244 - RNA, 17 nt, Mus musculus
ugacuucuuugcgggcc

SEQ ID NO: 2245 - RNA, 17 nt, Mus musculus
gacuucuuugcgggcca

SEQ ID NO: 2246 - RNA, 17 nt, Mus musculus
gaaggagucugugccug

SEQ ID NO: 2247 - RNA, 17 nt, Mus musculus
acugggcucugugccca

SEQ ID NO: 2248 - RNA, 17 nt, Mus musculus
gcgcugcuagcugucgc

SEQ ID NO: 2249 - RNA, 17 nt, Mus musculus
cuagcugucgcucugug

SEQ ID NO: 2250 - RNA, 17 nt, Mus musculus
cugucgcucugugguuc

SEQ ID NO: 2251 - RNA, 17 nt, Mus musculus
ucugugguucugcgugg

SEQ ID NO: 2252 - RNA, 17 nt, Mus musculus
cugugguucugcgugga

SEQ ID NO: 2253 - RNA, 17 nt, Mus musculus
agccgccucuguggguu

SEQ ID NO: 2254 - RNA, 17 nt, Mus musculus
cuguggguuugacuggc

SEQ ID NO: 2255 - RNA, 17 nt, Mus musculus
uguggguuugacuggcg

SEQ ID NO: 2256 - RNA, 17 nt, Mus musculus
cuggcgauuuucuccau

SEQ ID NO: 2257 - RNA, 17 nt, Mus musculus
uggcgauuuucuccauc

SEQ ID NO: 2258 - RNA, 17 nt, Mus musculus
ggcgauuuucuccaucc

SEQ ID NO: 2259 - RNA, 17 nt, Mus musculus
gcgauuuucuccauccc

SEQ ID NO: 2260 - RNA, 17 nt, Mus musculus
gauuuucuccauccccc

SEQ ID NO: 2261 - RNA, 17 nt, Mus musculus
uucuccauccccccaag

SEQ ID NO: 2262 - RNA, 17 nt, Mus musculus
cccaagcucagcacaca

SEQ ID NO: 2263 - RNA, 17 nt, Mus musculus
aaagacauacugacaau

SEQ ID NO: 2264 - RNA, 17 nt, Mus musculus
cugacaauuuuggcaaa

SEQ ID NO: 2265 - RNA, 17 nt, Mus musculus
ugacaauuuuggcaaau

SEQ ID NO: 2266 - RNA, 17 nt, Mus musculus
gacaauuuuggcaaaua

SEQ ID NO: 2267 - RNA, 17 nt, Mus musculus
uggcaaauacaacccuu

SEQ ID NO: 2268 - RNA, 17 nt, Mus musculus
acaacccuucagauuac

SEQ ID NO: 2269 - RNA, 17 nt, Mus musculus
caacccuucagauuacu

SEQ ID NO: 2270 - RNA, 17 nt, Mus musculus
cuucagauuacuugcag

SEQ ID NO: 2271 - RNA, 17 nt, Mus musculus
uucagauuacuugcagg

SEQ ID NO: 2272 - RNA, 17 nt, Mus musculus
agauuacuugcagggga

SEQ ID NO: 2273 - RNA, 17 nt, Mus musculus
ccaaugcucagcgugau

SEQ ID NO: 2274 - RNA, 17 nt, Mus musculus
agcgugauucugaggaa

SEQ ID NO: 2275 - RNA, 17 nt, Mus musculus
gcgugauucugaggaaa

SEQ ID NO: 2276 - RNA, 17 nt, Mus musculus
gaaaggguauuggugac

SEQ ID NO: 2277 - RNA, 17 nt, Mus musculus
aaggguauuggugacug

SEQ ID NO: 2278 - RNA, 17 nt, Mus musculus
gugacaguaucuucugc

SEQ ID NO: 2279 - RNA, 17 nt, Mus musculus
gacaguaucuucugcaa

SEQ ID NO: 2280 - RNA, 17 nt, Mus musculus
caguaucuucugcaaaa

SEQ ID NO: 2281 - RNA, 17 nt, Mus musculus
aguaucuucugcaaaac

SEQ ID NO: 2282 - RNA, 17 nt, Mus musculus
aaaacacucaccauucc

SEQ ID NO: 2283 - RNA, 17 nt, Mus musculus
cucaccauucccagggu

SEQ ID NO: 2284 - RNA, 17 nt, Mus musculus
ucaccauucccagggug

SEQ ID NO: 2285 - RNA, 17 nt, Mus musculus
agggugguuggaaauga

SEQ ID NO: 2286 - RNA, 17 nt, Mus musculus
gaaaugauacuggagcc

SEQ ID NO: 2287 - RNA, 17 nt, Mus musculus
caagugcucguaccggg

SEQ ID NO: 2288 - RNA, 17 nt, Mus musculus
gugcucguaccgggacg

SEQ ID NO: 2289 - RNA, 17 nt, Mus musculus
cgggacgucgacauagc

SEQ ID NO: 2290 - RNA, 17 nt, Mus musculus
gucgacauagccuccac

SEQ ID NO: 2291 - RNA, 17 nt, Mus musculus
cauagccuccacuguuu

SEQ ID NO: 2292 - RNA, 17 nt, Mus musculus
uccacuguuuaugucua

SEQ ID NO: 2293 - RNA, 17 nt, Mus musculus
ccacuguuuaugucuau

SEQ ID NO: 2294 - RNA, 17 nt, Mus musculus
cacuguuuaugucuaug

SEQ ID NO: 2295 - RNA, 17 nt, Mus musculus
guuuaugucuauguucg

SEQ ID NO: 2296 - RNA, 17 nt, Mus musculus
uuaugucuauguucgag

SEQ ID NO: 2297 - RNA, 17 nt, Mus musculus
gucuauguucgagauua

SEQ ID NO: 2298 - RNA, 17 nt, Mus musculus
ucuauguucgagauuac

SEQ ID NO: 2299 - RNA, 17 nt, Mus musculus
uucgagauuacagauca

SEQ ID NO: 2300 - RNA, 17 nt, Mus musculus
ucgagauuacagaucac

SEQ ID NO: 2301 - RNA, 17 nt, Mus musculus
uuacagaucaccauuca

SEQ ID NO: 2302 - RNA, 17 nt, Mus musculus
aucaccauucaucgccu

SEQ ID NO: 2303 - RNA, 17 nt, Mus musculus
ucaccauucaucgccuc

SEQ ID NO: 2304 - RNA, 17 nt, Mus musculus
ccauucaucgccucugu

SEQ ID NO: 2305 - RNA, 17 nt, Mus musculus
caucgccucugucagug

SEQ ID NO: 2306 - RNA, 17 nt, Mus musculus
gccucugucagugacca

SEQ ID NO: 2307 - RNA, 17 nt, Mus musculus
cauggcaucguguacau

SEQ ID NO: 2308 - RNA, 17 nt, Mus musculus
caucguguacaucaccg

SEQ ID NO: 2309 - RNA, 17 nt, Mus musculus
guguacaucaccgagaa

SEQ ID NO: 2310 - RNA, 17 nt, Mus musculus
guggugauccccugccg

SEQ ID NO: 2311 - RNA, 17 nt, Mus musculus
ccgagggucgauuucaa

SEQ ID NO: 2312 - RNA, 17 nt, Mus musculus
gggucgauuucaaaccu

SEQ ID NO: 2313 - RNA, 17 nt, Mus musculus
ggucgauuucaaaccuc

SEQ ID NO: 2314 - RNA, 17 nt, Mus musculus
gucgauuucaaaccuca

SEQ ID NO: 2315 - RNA, 17 nt, Mus musculus
ucaaaccucaauguguc

SEQ ID NO: 2316 - RNA, 17 nt, Mus musculus
caaugugucucuuugcg

SEQ ID NO: 2317 - RNA, 17 nt, Mus musculus
augugucucuuugcgcu

SEQ ID NO: 2318 - RNA, 17 nt, Mus musculus
gugucucuuugcgcuag

SEQ ID NO: 2319 - RNA, 17 nt, Mus musculus
ugucucuuugcgcuagg

SEQ ID NO: 2320 - RNA, 17 nt, Mus musculus
uuugcgcuagguaucca

SEQ ID NO: 2321 - RNA, 17 nt, Mus musculus
cgcuagguauccagaaa

SEQ ID NO: 2322 - RNA, 17 nt, Mus musculus
cuagguauccagaaaag

SEQ ID NO: 2323 - RNA, 17 nt, Mus musculus
aaagagauuuguuccgg

SEQ ID NO: 2324 - RNA, 17 nt, Mus musculus
aagagauuuguuccgga

SEQ ID NO: 2325 - RNA, 17 nt, Mus musculus
agauuuguuccggaugg

SEQ ID NO: 2326 - RNA, 17 nt, Mus musculus
gauuuguuccggaugga

SEQ ID NO: 2327 - RNA, 17 nt, Mus musculus
agcgagauaggcuuuac

SEQ ID NO: 2328 - RNA, 17 nt, Mus musculus
gauaggcuuuacucucc

SEQ ID NO: 2329 - RNA, 17 nt, Mus musculus
auaggcuuuacucuccc

SEQ ID NO: 2330 - RNA, 17 nt, Mus musculus
uaggcuuuacucucccc

SEQ ID NO: 2331 - RNA, 17 nt, Mus musculus
gcuuuacucuccccagu

SEQ ID NO: 2332 - RNA, 17 nt, Mus musculus
uuuacucuccccaguua

SEQ ID NO: 2333 - RNA, 17 nt, Mus musculus
uccccaguuacaugauc

SEQ ID NO: 2334 - RNA, 17 nt, Mus musculus
ccccaguuacaugauca

SEQ ID NO: 2335 - RNA, 17 nt, Mus musculus
gaucagcuaugccggca

SEQ ID NO: 2336 - RNA, 17 nt, Mus musculus
cauggucuucugugagg

SEQ ID NO: 2337 - RNA, 17 nt, Mus musculus
auggucuucugugaggc

SEQ ID NO: 2338 - RNA, 17 nt, Mus musculus
gcaaagaucaaugauga

SEQ ID NO: 2339 - RNA, 17 nt, Mus musculus
ugaaaccuaucagucua

SEQ ID NO: 2340 - RNA, 17 nt, Mus musculus
aaaccuaucagucuauc

SEQ ID NO: 2341 - RNA, 17 nt, Mus musculus
cuaucagucuaucaugu

SEQ ID NO: 2342 - RNA, 17 nt, Mus musculus
aucagucuaucauguac

SEQ ID NO: 2343 - RNA, 17 nt, Mus musculus
cagucuaucauguacau

SEQ ID NO: 2344 - RNA, 17 nt, Mus musculus
uaucauguacauaguug

SEQ ID NO: 2345 - RNA, 17 nt, Mus musculus
auguacauaguuguggu

SEQ ID NO: 2346 - RNA, 17 nt, Mus musculus
uacauaguugugguugu

SEQ ID NO: 2347 - RNA, 17 nt, Mus musculus
guugugguuguaggaua

SEQ ID NO: 2348 - RNA, 17 nt, Mus musculus
gugguuguaggauauag

SEQ ID NO: 2349 - RNA, 17 nt, Mus musculus
uguaggauauaggauuu

SEQ ID NO: 2350 - RNA, 17 nt, Mus musculus
uaggauauaggauuuau

SEQ ID NO: 2351 - RNA, 17 nt, Mus musculus
uaggauuuaugauguga

SEQ ID NO: 2352 - RNA, 17 nt, Mus musculus
gaugugauucugagccc

SEQ ID NO: 2353 - RNA, 17 nt, Mus musculus
augugauucugagcccc

SEQ ID NO: 2354 - RNA, 17 nt, Mus musculus
caugaaauugagcuauc

SEQ ID NO: 2355 - RNA, 17 nt, Mus musculus
auugagcuaucugccgg

SEQ ID NO: 2356 - RNA, 17 nt, Mus musculus
ugagcuaucugccggag

SEQ ID NO: 2357 - RNA, 17 nt, Mus musculus
gaaaaacuugucuuaaa

SEQ ID NO: 2358 - RNA, 17 nt, Mus musculus
aaacuugucuuaaauug

SEQ ID NO: 2359 - RNA, 17 nt, Mus musculus
acuugucuuaaauugua

SEQ ID NO: 2360 - RNA, 17 nt, Mus musculus
ucuuaaauuguacagcg

SEQ ID NO: 2361 - RNA, 17 nt, Mus musculus
uaaauuguacagcgaga

SEQ ID NO: 2362 - RNA, 17 nt, Mus musculus
acagagcucaauguggg

SEQ ID NO: 2363 - RNA, 17 nt, Mus musculus
guggggcuugauuucac

SEQ ID NO: 2364 - RNA, 17 nt, Mus musculus
ggcuugauuucaccugg

SEQ ID NO: 2365 - RNA, 17 nt, Mus musculus
gcuugauuucaccuggc

SEQ ID NO: 2366 - RNA, 17 nt, Mus musculus
cuugauuucaccuggca

SEQ ID NO: 2367 - RNA, 17 nt, Mus musculus
cuggcacucuccaccuu

SEQ ID NO: 2368 - RNA, 17 nt, Mus musculus
ggcacucuccaccuuca

SEQ ID NO: 2369 - RNA, 17 nt, Mus musculus
cuccaccuucaaagucu

SEQ ID NO: 2370 - RNA, 17 nt, Mus musculus
uccaccuucaaagucuc

SEQ ID NO: 2371 - RNA, 17 nt, Mus musculus
uucaaagucucaucaua

SEQ ID NO: 2372 - RNA, 17 nt, Mus musculus
caaagucucaucauaag

SEQ ID NO: 2373 - RNA, 17 nt, Mus musculus
agucucaucauaagaag

SEQ ID NO: 2374 - RNA, 17 nt, Mus musculus
cucaucauaagaagauu

SEQ ID NO: 2375 - RNA, 17 nt, Mus musculus
aagaagauuguaaaccg

SEQ ID NO: 2376 - RNA, 17 nt, Mus musculus
aagauuguaaaccggga

SEQ ID NO: 2377 - RNA, 17 nt, Mus musculus
gaaacccuuuccuggga

SEQ ID NO: 2378 - RNA, 17 nt, Mus musculus
aaacccuuuccugggac

SEQ ID NO: 2379 - RNA, 17 nt, Mus musculus
aacccuuuccugggacu

SEQ ID NO: 2380 - RNA, 17 nt, Mus musculus
gaagauguuuuugagca

SEQ ID NO: 2381 - RNA, 17 nt, Mus musculus
aagauguuuuugagcac

SEQ ID NO: 2382 - RNA, 17 nt, Mus musculus
agauguuuuugagcacc

SEQ ID NO: 2383 - RNA, 17 nt, Mus musculus
gauguuuuugagcaccu

SEQ ID NO: 2384 - RNA, 17 nt, Mus musculus
gagcaccuugacaauag

SEQ ID NO: 2385 - RNA, 17 nt, Mus musculus
uugacaauagaaagugu

SEQ ID NO: 2386 - RNA, 17 nt, Mus musculus
aggggaauacaccugug

SEQ ID NO: 2387 - RNA, 17 nt, Mus musculus
accuguguagcguccag

SEQ ID NO: 2388 - RNA, 17 nt, Mus musculus
uguagcguccaguggac

SEQ ID NO: 2389 - RNA, 17 nt, Mus musculus
cggaugaucaagagaaa

SEQ ID NO: 2390 - RNA, 17 nt, Mus musculus
agagaaauagaacauuu

SEQ ID NO: 2391 - RNA, 17 nt, Mus musculus
uagaacauuuguccgag

SEQ ID NO: 2392 - RNA, 17 nt, Mus musculus
agaacauuuguccgagu

SEQ ID NO: 2393 - RNA, 17 nt, Mus musculus
acauuuguccgaguuca

SEQ ID NO: 2394 - RNA, 17 nt, Mus musculus
guccgaguucacacaaa

SEQ ID NO: 2395 - RNA, 17 nt, Mus musculus
uccgaguucacacaaag

SEQ ID NO: 2396 - RNA, 17 nt, Mus musculus
caaagccuuuuauugcu

SEQ ID NO: 2397 - RNA, 17 nt, Mus musculus
aaagccuuuuauugcuu

SEQ ID NO: 2398 - RNA, 17 nt, Mus musculus
aagccuuuuauugcuuu

SEQ ID NO: 2399 - RNA, 17 nt, Mus musculus
agccuuuuauugcuuuc

SEQ ID NO: 2400 - RNA, 17 nt, Mus musculus
ccuuuuauugcuuucgg

SEQ ID NO: 2401 - RNA, 17 nt, Mus musculus
uuauugcuuucgguagu

SEQ ID NO: 2402 - RNA, 17 nt, Mus musculus
uauugcuuucgguagug

SEQ ID NO: 2403 - RNA, 17 nt, Mus musculus
auugcuuucgguagugg

SEQ ID NO: 2404 - RNA, 17 nt, Mus musculus
cuuucgguagugggaug

SEQ ID NO: 2405 - RNA, 17 nt, Mus musculus
gaugaaaucuuuggugg

SEQ ID NO: 2406 - RNA, 17 nt, Mus musculus
ugaaaucuuugguggaa

SEQ ID NO: 2407 - RNA, 17 nt, Mus musculus
gaaaucuuugguggaag

SEQ ID NO: 2408 - RNA, 17 nt, Mus musculus
ugggcagucaaguccga

SEQ ID NO: 2409 - RNA, 17 nt, Mus musculus
agucaaguccgaauccc

SEQ ID NO: 2410 - RNA, 17 nt, Mus musculus
guccgaaucccugugaa

SEQ ID NO: 2411 - RNA, 17 nt, Mus musculus
ugugaaguaucucaguu

SEQ ID NO: 2412 - RNA, 17 nt, Mus musculus
ugaaguaucucaguuac

SEQ ID NO: 2413 - RNA, 17 nt, Mus musculus
aaguaucucaguuaccc

SEQ ID NO: 2414 - RNA, 17 nt, Mus musculus
aucucaguuacccagcu

SEQ ID NO: 2415 - RNA, 17 nt, Mus musculus
ucucaguuacccagcuc

SEQ ID NO: 2416 - RNA, 17 nt, Mus musculus
acccagcuccugauauc

SEQ ID NO: 2417 - RNA, 17 nt, Mus musculus
cuccugauaucaaaugg

SEQ ID NO: 2418 - RNA, 17 nt, Mus musculus
ccugauaucaaauggua

SEQ ID NO: 2419 - RNA, 17 nt, Mus musculus
caaaugguacagaaaug

SEQ ID NO: 2420 - RNA, 17 nt, Mus musculus
aggcccauugaguccaa

SEQ ID NO: 2421 - RNA, 17 nt, Mus musculus
cauugaguccaacuaca

SEQ ID NO: 2422 - RNA, 17 nt, Mus musculus
guccaacuacacaauga

SEQ ID NO: 2423 - RNA, 17 nt, Mus musculus
acaaugauuguuggcga

SEQ ID NO: 2424 - RNA, 17 nt, Mus musculus
augauuguuggcgauga

SEQ ID NO: 2425 - RNA, 17 nt, Mus musculus
gaugaacucaccaucau

SEQ ID NO: 2426 - RNA, 17 nt, Mus musculus
cucaccaucauggaagu

SEQ ID NO: 2427 - RNA, 17 nt, Mus musculus
aggaaacuacacgguca

SEQ ID NO: 2428 - RNA, 17 nt, Mus musculus
uacacggucauccucac

SEQ ID NO: 2429 - RNA, 17 nt, Mus musculus
acggucauccucaccaa

SEQ ID NO: 2430 - RNA, 17 nt, Mus musculus
gucauccucaccaaccc

SEQ ID NO: 2431 - RNA, 17 nt, Mus musculus
aaccccauuucaaugga

SEQ ID NO: 2432 - RNA, 17 nt, Mus musculus
accccauuucaauggag

SEQ ID NO: 2433 - RNA, 17 nt, Mus musculus
ccccauuucaauggaga

SEQ ID NO: 2434 - RNA, 17 nt, Mus musculus
cacauggucucucuggu

SEQ ID NO: 2435 - RNA, 17 nt, Mus musculus
cauggucucucugguug

SEQ ID NO: 2436 - RNA, 17 nt, Mus musculus
ucucugguugugaaugu

SEQ ID NO: 2437 - RNA, 17 nt, Mus musculus
gugaaugucccacccca

SEQ ID NO: 2438 - RNA, 17 nt, Mus musculus
ccccagaucggugagaa

SEQ ID NO: 2439 - RNA, 17 nt, Mus musculus
gaaagccuugaucucgc

SEQ ID NO: 2440 - RNA, 17 nt, Mus musculus
gccuugaucucgccuau

SEQ ID NO: 2441 - RNA, 17 nt, Mus musculus
cuugaucucgccuaugg

SEQ ID NO: 2442 - RNA, 17 nt, Mus musculus
ucucgccuauggauucc

SEQ ID NO: 2443 - RNA, 17 nt, Mus musculus
cuauggauuccuaccag

SEQ ID NO: 2444 - RNA, 17 nt, Mus musculus
uauggauuccuaccagu

SEQ ID NO: 2445 - RNA, 17 nt, Mus musculus
ggauuccuaccaguaug

SEQ ID NO: 2446 - RNA, 17 nt, Mus musculus
cuaccaguaugggacca

SEQ ID NO: 2447 - RNA, 17 nt, Mus musculus
gcagacauugacaugca

SEQ ID NO: 2448 - RNA, 17 nt, Mus musculus
ugcacagucuacgccaa

SEQ ID NO: 2449 - RNA, 17 nt, Mus musculus
cacagucuacgccaacc

SEQ ID NO: 2450 - RNA, 17 nt, Mus musculus
ccaacccuccccugcac

SEQ ID NO: 2451 - RNA, 17 nt, Mus musculus
caccacauccaguggua

SEQ ID NO: 2452 - RNA, 17 nt, Mus musculus
ccagugguacuggcagc

SEQ ID NO: 2453 - RNA, 17 nt, Mus musculus
uggcagcuagaagaagc

SEQ ID NO: 2454 - RNA, 17 nt, Mus musculus
agccugcuccuacagac

SEQ ID NO: 2455 - RNA, 17 nt, Mus musculus
cugcuccuacagacccg

SEQ ID NO: 2456 - RNA, 17 nt, Mus musculus
aagcccguaugcuugua

SEQ ID NO: 2457 - RNA, 17 nt, Mus musculus
cguaugcuuguaaagaa

SEQ ID NO: 2458 - RNA, 17 nt, Mus musculus
augcuuguaaagaaugg

SEQ ID NO: 2459 - RNA, 17 nt, Mus musculus
uggaggauuuccagggg

SEQ ID NO: 2460 - RNA, 17 nt, Mus musculus
ggaggauuuccaggggg

SEQ ID NO: 2461 - RNA, 17 nt, Mus musculus
gaggauuuccagggggg

SEQ ID NO: 2462 - RNA, 17 nt, Mus musculus
aacaagaucgaagucac

SEQ ID NO: 2463 - RNA, 17 nt, Mus musculus
aucgaagucaccaaaaa

SEQ ID NO: 2464 - RNA, 17 nt, Mus musculus
aaaccaauaugcccuga

SEQ ID NO: 2465 - RNA, 17 nt, Mus musculus
gcccugauugaaggaaa

SEQ ID NO: 2466 - RNA, 17 nt, Mus musculus
aaaacuguaaguacgcu

SEQ ID NO: 2467 - RNA, 17 nt, Mus musculus
cuguaaguacgcugguc

SEQ ID NO: 2468 - RNA, 17 nt, Mus musculus
acgcuggucauccaagc

SEQ ID NO: 2469 - RNA, 17 nt, Mus musculus
cuggucauccaagcugc

SEQ ID NO: 2470 - RNA, 17 nt, Mus musculus
caacgugucagcguugu

SEQ ID NO: 2471 - RNA, 17 nt, Mus musculus
gucagcguuguacaaau

SEQ ID NO: 2472 - RNA, 17 nt, Mus musculus
agcguuguacaaaugug

SEQ ID NO: 2473 - RNA, 17 nt, Mus musculus
gaagccaucaacaaagc

SEQ ID NO: 2474 - RNA, 17 nt, Mus musculus
gagagggucaucuccuu

SEQ ID NO: 2475 - RNA, 17 nt, Mus musculus
agggucaucuccuucca

SEQ ID NO: 2476 - RNA, 17 nt, Mus musculus
ggucaucuccuuccaug

SEQ ID NO: 2477 - RNA, 17 nt, Mus musculus
caucuccuuccauguga

SEQ ID NO: 2478 - RNA, 17 nt, Mus musculus
aucuccuuccaugugau

SEQ ID NO: 2479 - RNA, 17 nt, Mus musculus
caugugaucaggggucc

SEQ ID NO: 2480 - RNA, 17 nt, Mus musculus
ucagggguccugaaauu

SEQ ID NO: 2481 - RNA, 17 nt, Mus musculus
ccugaaauuacugugca

SEQ ID NO: 2482 - RNA, 17 nt, Mus musculus
cugaaauuacugugcaa

SEQ ID NO: 2483 - RNA, 17 nt, Mus musculus
gagugugucccuguugu

SEQ ID NO: 2484 - RNA, 17 nt, Mus musculus
gucccuguugugcacug

SEQ ID NO: 2485 - RNA, 17 nt, Mus musculus
acagaaauacguuugag

SEQ ID NO: 2486 - RNA, 17 nt, Mus musculus
aaauacguuugagaacc

SEQ ID NO: 2487 - RNA, 17 nt, Mus musculus
aauacguuugagaaccu

SEQ ID NO: 2488 - RNA, 17 nt, Mus musculus
gagaaccucacguggua

SEQ ID NO: 2489 - RNA, 17 nt, Mus musculus
cacgugguacaagcuug

SEQ ID NO: 2490 - RNA, 17 nt, Mus musculus
uacaagcuuggcucaca

SEQ ID NO: 2491 - RNA, 17 nt, Mus musculus
gcuuggcucacaggcaa

SEQ ID NO: 2492 - RNA, 17 nt, Mus musculus
ggcaacaucgguccaca

SEQ ID NO: 2493 - RNA, 17 nt, Mus musculus
acaucgguccacauggg

SEQ ID NO: 2494 - RNA, 17 nt, Mus musculus
gggcgaaucacucacac

SEQ ID NO: 2495 - RNA, 17 nt, Mus musculus
gaaucacucacaccagu

SEQ ID NO: 2496 - RNA, 17 nt, Mus musculus
acaccaguuugcaagaa

SEQ ID NO: 2497 - RNA, 17 nt, Mus musculus
caccaguuugcaagaac

SEQ ID NO: 2498 - RNA, 17 nt, Mus musculus
caagaacuuggaugcuc

SEQ ID NO: 2499 - RNA, 17 nt, Mus musculus
uggaugcucuuuggaaa

SEQ ID NO: 2500 - RNA, 17 nt, Mus musculus
gaugcucuuuggaaacu

SEQ ID NO: 2501 - RNA, 17 nt, Mus musculus
augcucuuuggaaacug

SEQ ID NO: 2502 - RNA, 17 nt, Mus musculus
caccauguuuucuaaca

SEQ ID NO: 2503 - RNA, 17 nt, Mus musculus
accauguuuucuaacag

SEQ ID NO: 2504 - RNA, 17 nt, Mus musculus
ccauguuuucuaacagc

SEQ ID NO: 2505 - RNA, 17 nt, Mus musculus
cauguuuucuaacagca

SEQ ID NO: 2506 - RNA, 17 nt, Mus musculus
uguuuucuaacagcaca

SEQ ID NO: 2507 - RNA, 17 nt, Mus musculus
aaugacaucuugauugu

SEQ ID NO: 2508 - RNA, 17 nt, Mus musculus
ugacaucuugauugugg

SEQ ID NO: 2509 - RNA, 17 nt, Mus musculus
aucuugauuguggcauu

SEQ ID NO: 2510 - RNA, 17 nt, Mus musculus
uguggcauuucagaaug

SEQ ID NO: 2511 - RNA, 17 nt, Mus musculus
guggcauuucagaaugc

SEQ ID NO: 2512 - RNA, 17 nt, Mus musculus
uggcauuucagaaugcc

SEQ ID NO: 2513 - RNA, 17 nt, Mus musculus
gaaugccucucugcagg

SEQ ID NO: 2514 - RNA, 17 nt, Mus musculus
augccucucugcaggac

SEQ ID NO: 2515 - RNA, 17 nt, Mus musculus
aggcgacuauguuugcu

SEQ ID NO: 2516 - RNA, 17 nt, Mus musculus
gacuauguuugcucugc

SEQ ID NO: 2517 - RNA, 17 nt, Mus musculus
acuauguuugcucugcu

SEQ ID NO: 2518 - RNA, 17 nt, Mus musculus
uguuugcucugcucaag

SEQ ID NO: 2519 - RNA, 17 nt, Mus musculus
gcucugcucaagauaag

SEQ ID NO: 2520 - RNA, 17 nt, Mus musculus
cucaagauaagaagacc

SEQ ID NO: 2521 - RNA, 17 nt, Mus musculus
aaagacauugccugguc

SEQ ID NO: 2522 - RNA, 17 nt, Mus musculus
ugccuggucaaacagcu

SEQ ID NO: 2523 - RNA, 17 nt, Mus musculus
aaacagcucaucauccu

SEQ ID NO: 2524 - RNA, 17 nt, Mus musculus
cagcucaucauccuaga

SEQ ID NO: 2525 - RNA, 17 nt, Mus musculus
cucaucauccuagagcg

SEQ ID NO: 2526 - RNA, 17 nt, Mus musculus
aucauccuagagcgcau

SEQ ID NO: 2527 - RNA, 17 nt, Mus musculus
cccaugaucaccggaaa

SEQ ID NO: 2528 - RNA, 17 nt, Mus musculus
ccggaaaucuggagaau

SEQ ID NO: 2529 - RNA, 17 nt, Mus musculus
uggagaaucagacaaca

SEQ ID NO: 2530 - RNA, 17 nt, Mus musculus
acaaccauuggcgagac

SEQ ID NO: 2531 - RNA, 17 nt, Mus musculus
gagaccauugaagugac

SEQ ID NO: 2532 - RNA, 17 nt, Mus musculus
aagugacuugcccagca

SEQ ID NO: 2533 - RNA, 17 nt, Mus musculus
cccagcaucuggaaauc

SEQ ID NO: 2534 - RNA, 17 nt, Mus musculus
cuggaaauccuacccca

SEQ ID NO: 2535 - RNA, 17 nt, Mus musculus
gaaauccuaccccacac

SEQ ID NO: 2536 - RNA, 17 nt, Mus musculus
ccacacauuacaugguu

SEQ ID NO: 2537 - RNA, 17 nt, Mus musculus
cacacauuacaugguuc

SEQ ID NO: 2538 - RNA, 17 nt, Mus musculus
uacaugguucaaagaca

SEQ ID NO: 2539 - RNA, 17 nt, Mus musculus
acaugguucaaagacaa

SEQ ID NO: 2540 - RNA, 17 nt, Mus musculus
acccugguagaagauuc

SEQ ID NO: 2541 - RNA, 17 nt, Mus musculus
uagaagauucaggcauu

SEQ ID NO: 2542 - RNA, 17 nt, Mus musculus
agaagauucaggcauug

SEQ ID NO: 2543 - RNA, 17 nt, Mus musculus
ucaggcauuguacugag

SEQ ID NO: 2544 - RNA, 17 nt, Mus musculus
ggcauuguacugagaga

SEQ ID NO: 2545 - RNA, 17 nt, Mus musculus
accugacuauccgcagg

SEQ ID NO: 2546 - RNA, 17 nt, Mus musculus
cugacuauccgcagggu

SEQ ID NO: 2547 - RNA, 17 nt, Mus musculus
ggaggccucuacaccug

SEQ ID NO: 2548 - RNA, 17 nt, Mus musculus
ugcaauguccuuggcug

SEQ ID NO: 2549 - RNA, 17 nt, Mus musculus
aauguccuuggcugugc

SEQ ID NO: 2550 - RNA, 17 nt, Mus musculus
gagacgcucuucauaau

SEQ ID NO: 2551 - RNA, 17 nt, Mus musculus
gacgcucuucauaauag

SEQ ID NO: 2552 - RNA, 17 nt, Mus musculus
acgcucuucauaauaga

SEQ ID NO: 2553 - RNA, 17 nt, Mus musculus
cucuucauaauagaagg

SEQ ID NO: 2554 - RNA, 17 nt, Mus musculus
gaccaacuuggaaguca

SEQ ID NO: 2555 - RNA, 17 nt, Mus musculus
uuggaagucauuauccu

SEQ ID NO: 2556 - RNA, 17 nt, Mus musculus
gaagucauuauccucgu

SEQ ID NO: 2557 - RNA, 17 nt, Mus musculus
aagucauuauccucguc

SEQ ID NO: 2558 - RNA, 17 nt, Mus musculus
gucauuauccucgucgg

SEQ ID NO: 2559 - RNA, 17 nt, Mus musculus
auuauccucgucggcac

SEQ ID NO: 2560 - RNA, 17 nt, Mus musculus
auccucgucggcacugc

SEQ ID NO: 2561 - RNA, 17 nt, Mus musculus
gcagugauugccauguu

SEQ ID NO: 2562 - RNA, 17 nt, Mus musculus
cauguucuucuggcucc

SEQ ID NO: 2563 - RNA, 17 nt, Mus musculus
auguucuucuggcuccu

SEQ ID NO: 2564 - RNA, 17 nt, Mus musculus
uucuggcuccuucuugu

SEQ ID NO: 2565 - RNA, 17 nt, Mus musculus
uggcuccuucuugucau

SEQ ID NO: 2566 - RNA, 17 nt, Mus musculus
ggcuccuucuugucauu

SEQ ID NO: 2567 - RNA, 17 nt, Mus musculus
cuccuucuugucauugu

SEQ ID NO: 2568 - RNA, 17 nt, Mus musculus
cuucuugucauuguccu

SEQ ID NO: 2569 - RNA, 17 nt, Mus musculus
cuugucauuguccuacg

SEQ ID NO: 2570 - RNA, 17 nt, Mus musculus
gucauuguccuacggac

SEQ ID NO: 2571 - RNA, 17 nt, Mus musculus
auuguccuacggaccgu

SEQ ID NO: 2572 - RNA, 17 nt, Mus musculus
cggaccguuaagcgggc

SEQ ID NO: 2573 - RNA, 17 nt, Mus musculus
gacaggcuacuugucua

SEQ ID NO: 2574 - RNA, 17 nt, Mus musculus
aggcuacuugucuauug

SEQ ID NO: 2575 - RNA, 17 nt, Mus musculus
cuacuugucuauuguca

SEQ ID NO: 2576 - RNA, 17 nt, Mus musculus
acuugucuauugucaug

SEQ ID NO: 2577 - RNA, 17 nt, Mus musculus
uugucuauugucaugga

SEQ ID NO: 2578 - RNA, 17 nt, Mus musculus
ucuauugucauggaucc

SEQ ID NO: 2579 - RNA, 17 nt, Mus musculus
agaugaauugcccuugg

SEQ ID NO: 2580 - RNA, 17 nt, Mus musculus
auugcccuuggaugagc

SEQ ID NO: 2581 - RNA, 17 nt, Mus musculus
ugaacgcuugccuuaug

SEQ ID NO: 2582 - RNA, 17 nt, Mus musculus
gcuugccuuaugaugcc

SEQ ID NO: 2583 - RNA, 17 nt, Mus musculus
cuugccuuaugaugcca

SEQ ID NO: 2584 - RNA, 17 nt, Mus musculus
gugggaauuccccaggg

SEQ ID NO: 2585 - RNA, 17 nt, Mus musculus
ugggaauuccccaggga

SEQ ID NO: 2586 - RNA, 17 nt, Mus musculus
cugaaacuaggaaaacc

SEQ ID NO: 2587 - RNA, 17 nt, Mus musculus
gaaaaccucuuggccgc

SEQ ID NO: 2588 - RNA, 17 nt, Mus musculus
aaaccucuuggccgcgg

SEQ ID NO: 2589 - RNA, 17 nt, Mus musculus
cggugccuucggccaag

SEQ ID NO: 2590 - RNA, 17 nt, Mus musculus
ggugccuucggccaagu

SEQ ID NO: 2591 - RNA, 17 nt, Mus musculus
caagugauugaggcaga

SEQ ID NO: 2592 - RNA, 17 nt, Mus musculus
cagacgcuuuuggaauu

SEQ ID NO: 2593 - RNA, 17 nt, Mus musculus
agacgcuuuuggaauug

SEQ ID NO: 2594 - RNA, 17 nt, Mus musculus
gacgcuuuuggaauuga

SEQ ID NO: 2595 - RNA, 17 nt, Mus musculus
cagcgacuugcaaaaca

SEQ ID NO: 2596 - RNA, 17 nt, Mus musculus
aaaacaguagccgucaa

SEQ ID NO: 2597 - RNA, 17 nt, Mus musculus
guagccgucaagauguu

SEQ ID NO: 2598 - RNA, 17 nt, Mus musculus
caagauguugaaagaag

SEQ ID NO: 2599 - RNA, 17 nt, Mus musculus
gcgagcaucgagcccuc

SEQ ID NO: 2600 - RNA, 17 nt, Mus musculus
cgagcccucaugucuga

SEQ ID NO: 2601 - RNA, 17 nt, Mus musculus
ccucaugucugaacuca

SEQ ID NO: 2602 - RNA, 17 nt, Mus musculus
cucaagauccucaucca

SEQ ID NO: 2603 - RNA, 17 nt, Mus musculus
aagauccucauccacau

SEQ ID NO: 2604 - RNA, 17 nt, Mus musculus
auccucauccacauugg

SEQ ID NO: 2605 - RNA, 17 nt, Mus musculus
auccacauuggucacca

SEQ ID NO: 2606 - RNA, 17 nt, Mus musculus
acauuggucaccaucuc

SEQ ID NO: 2607 - RNA, 17 nt, Mus musculus
gugaaccuccuaggcgc

SEQ ID NO: 2608 - RNA, 17 nt, Mus musculus
aaccuccuaggcgccug

SEQ ID NO: 2609 - RNA, 17 nt, Mus musculus
gagggccucucauggug

SEQ ID NO: 2610 - RNA, 17 nt, Mus musculus
gggccucucauggugau

SEQ ID NO: 2611 - RNA, 17 nt, Mus musculus
uguggaauucugcaagu

SEQ ID NO: 2612 - RNA, 17 nt, Mus musculus
guggaauucugcaaguu

SEQ ID NO: 2613 - RNA, 17 nt, Mus musculus
cugcaaguuuggaaacc

SEQ ID NO: 2614 - RNA, 17 nt, Mus musculus
ugcaaguuuggaaaccu

SEQ ID NO: 2615 - RNA, 17 nt, Mus musculus
ggaaaccuaucaacuua

SEQ ID NO: 2616 - RNA, 17 nt, Mus musculus
aaaccuaucaacuuacu

SEQ ID NO: 2617 - RNA, 17 nt, Mus musculus
uaucaacuuacuuacgg

SEQ ID NO: 2618 - RNA, 17 nt, Mus musculus
aucaacuuacuuacggg

SEQ ID NO: 2619 - RNA, 17 nt, Mus musculus
aacuuacuuacggggca

SEQ ID NO: 2620 - RNA, 17 nt, Mus musculus
acuuacuuacggggcaa

SEQ ID NO: 2621 - RNA, 17 nt, Mus musculus
aaaugaauuuguucccu

SEQ ID NO: 2622 - RNA, 17 nt, Mus musculus
aaugaauuuguucccua

SEQ ID NO: 2623 - RNA, 17 nt, Mus musculus
gaauuuguucccuauaa

SEQ ID NO: 2624 - RNA, 17 nt, Mus musculus
aauuuguucccuauaag

SEQ ID NO: 2625 - RNA, 17 nt, Mus musculus
uguucccuauaagagca

SEQ ID NO: 2626 - RNA, 17 nt, Mus musculus
uucccuauaagagcaaa

SEQ ID NO: 2627 - RNA, 17 nt, Mus musculus
ggcacgcuuccgccagg

SEQ ID NO: 2628 - RNA, 17 nt, Mus musculus
gcacgcuuccgccaggg

SEQ ID NO: 2629 - RNA, 17 nt, Mus musculus
caaggacuacguugggg

SEQ ID NO: 2630 - RNA, 17 nt, Mus musculus
gacuacguuggggagcu

SEQ ID NO: 2631 - RNA, 17 nt, Mus musculus
ggggagcucuccgugga

SEQ ID NO: 2632 - RNA, 17 nt, Mus musculus
ggagcucuccguggauc

SEQ ID NO: 2633 - RNA, 17 nt, Mus musculus
ccguggaucugaaaaga

SEQ ID NO: 2634 - RNA, 17 nt, Mus musculus
aagacgcuuggacagca

SEQ ID NO: 2635 - RNA, 17 nt, Mus musculus
gacagcaucaccagcag

SEQ ID NO: 2636 - RNA, 17 nt, Mus musculus
ccagagcucugccagcu

SEQ ID NO: 2637 - RNA, 17 nt, Mus musculus
ugccagcucaggcuuug

SEQ ID NO: 2638 - RNA, 17 nt, Mus musculus
cucaggcuuuguugagg

SEQ ID NO: 2639 - RNA, 17 nt, Mus musculus
ucaggcuuuguugagga

SEQ ID NO: 2640 - RNA, 17 nt, Mus musculus
ggcuuuguugaggagaa

SEQ ID NO: 2641 - RNA, 17 nt, Mus musculus
ggagaaaucgcucagug

SEQ ID NO: 2642 - RNA, 17 nt, Mus musculus
aaaucgcucagugaugu

SEQ ID NO: 2643 - RNA, 17 nt, Mus musculus
agugauguagaggaaga

SEQ ID NO: 2644 - RNA, 17 nt, Mus musculus
aagaagcuucugaagaa

SEQ ID NO: 2645 - RNA, 17 nt, Mus musculus
agaagcuucugaagaac

SEQ ID NO: 2646 - RNA, 17 nt, Mus musculus
agaacuguacaaggacu

SEQ ID NO: 2647 - RNA, 17 nt, Mus musculus
caaggacuuccugaccu

SEQ ID NO: 2648 - RNA, 17 nt, Mus musculus
ggaguucuuggcaucaa

SEQ ID NO: 2649 - RNA, 17 nt, Mus musculus
cuuggcaucaaggaagu

SEQ ID NO: 2650 - RNA, 17 nt, Mus musculus
ggaaguguauccacagg

SEQ ID NO: 2651 - RNA, 17 nt, Mus musculus
cgaaacauucuccuauc

SEQ ID NO: 2652 - RNA, 17 nt, Mus musculus
gaaacauucuccuaucg

SEQ ID NO: 2653 - RNA, 17 nt, Mus musculus
aacauucuccuaucgga

SEQ ID NO: 2654 - RNA, 17 nt, Mus musculus
auucuccuaucggagaa

SEQ ID NO: 2655 - RNA, 17 nt, Mus musculus
ucuccuaucggagaaga

SEQ ID NO: 2656 - RNA, 17 nt, Mus musculus
aaugugguuaagaucug

SEQ ID NO: 2657 - RNA, 17 nt, Mus musculus
augugguuaagaucugu

SEQ ID NO: 2658 - RNA, 17 nt, Mus musculus
guuaagaucugugacuu

SEQ ID NO: 2659 - RNA, 17 nt, Mus musculus
cugugacuucggcuugg

SEQ ID NO: 2660 - RNA, 17 nt, Mus musculus
ugugacuucggcuuggc

SEQ ID NO: 2661 - RNA, 17 nt, Mus musculus
cuucggcuuggcccggg

SEQ ID NO: 2662 - RNA, 17 nt, Mus musculus
cgggacauuuauaaaga

SEQ ID NO: 2663 - RNA, 17 nt, Mus musculus
gggacauuuauaaagac

SEQ ID NO: 2664 - RNA, 17 nt, Mus musculus
ggacauuuauaaagacc

SEQ ID NO: 2665 - RNA, 17 nt, Mus musculus
acauuuauaaagacccg

SEQ ID NO: 2666 - RNA, 17 nt, Mus musculus
acccggauuaugucaga

SEQ ID NO: 2667 - RNA, 17 nt, Mus musculus
cccggauuaugucagaa

SEQ ID NO: 2668 - RNA, 17 nt, Mus musculus
gcccgacucccuuugaa

SEQ ID NO: 2669 - RNA, 17 nt, Mus musculus
gacucccuuugaagugg

SEQ ID NO: 2670 - RNA, 17 nt, Mus musculus
acucccuuugaagugga

SEQ ID NO: 2671 - RNA, 17 nt, Mus musculus
gaaaccauuuuugacag

SEQ ID NO: 2672 - RNA, 17 nt, Mus musculus
aaaccauuuuugacaga

SEQ ID NO: 2673 - RNA, 17 nt, Mus musculus
aaccauuuuugacagag

SEQ ID NO: 2674 - RNA, 17 nt, Mus musculus
accauuuuugacagagu

SEQ ID NO: 2675 - RNA, 17 nt, Mus musculus
gacagaguauacacaau

SEQ ID NO: 2676 - RNA, 17 nt, Mus musculus
cagaguauacacaauuc

SEQ ID NO: 2677 - RNA, 17 nt, Mus musculus
uacacaauucagagcga

SEQ ID NO: 2678 - RNA, 17 nt, Mus musculus
acacaauucagagcgau

SEQ ID NO: 2679 - RNA, 17 nt, Mus musculus
uguguggucuuucggug

SEQ ID NO: 2680 - RNA, 17 nt, Mus musculus
uguggucuuucggugug

SEQ ID NO: 2681 - RNA, 17 nt, Mus musculus
guggucuuucggugugu

SEQ ID NO: 2682 - RNA, 17 nt, Mus musculus
uggucuuucgguguguu

SEQ ID NO: 2683 - RNA, 17 nt, Mus musculus
cgguguguugcucuggg

SEQ ID NO: 2684 - RNA, 17 nt, Mus musculus
guguugcucugggaaau

SEQ ID NO: 2685 - RNA, 17 nt, Mus musculus
auuuuccuuaggugccu

SEQ ID NO: 2686 - RNA, 17 nt, Mus musculus
uuuuccuuaggugccuc

SEQ ID NO: 2687 - RNA, 17 nt, Mus musculus
aggugccuccccauacc

SEQ ID NO: 2688 - RNA, 17 nt, Mus musculus
cuccccauacccugggg

SEQ ID NO: 2689 - RNA, 17 nt, Mus musculus
ccuggggucaagauuga

SEQ ID NO: 2690 - RNA, 17 nt, Mus musculus
gucaagauugaugaaga

SEQ ID NO: 2691 - RNA, 17 nt, Mus musculus
ugaagaauuuuguagga

SEQ ID NO: 2692 - RNA, 17 nt, Mus musculus
gaagaauuuuguaggag

SEQ ID NO: 2693 - RNA, 17 nt, Mus musculus
aagaauuuuguaggaga

SEQ ID NO: 2694 - RNA, 17 nt, Mus musculus
aauuuuguaggagauug

SEQ ID NO: 2695 - RNA, 17 nt, Mus musculus
uaggagauugaaagaag

SEQ ID NO: 2696 - RNA, 17 nt, Mus musculus
aaggaacuagaaugcgg

SEQ ID NO: 2697 - RNA, 17 nt, Mus musculus
ugcgggcuccugacuac

SEQ ID NO: 2698 - RNA, 17 nt, Mus musculus
uccugacuacacuaccc

SEQ ID NO: 2699 - RNA, 17 nt, Mus musculus
acuacacuaccccagaa

SEQ ID NO: 2700 - RNA, 17 nt, Mus musculus
gagacccucguuuucag

SEQ ID NO: 2701 - RNA, 17 nt, Mus musculus
acccucguuuucagagu

SEQ ID NO: 2702 - RNA, 17 nt, Mus musculus
cccucguuuucagaguu

SEQ ID NO: 2703 - RNA, 17 nt, Mus musculus
ccucguuuucagaguug

SEQ ID NO: 2704 - RNA, 17 nt, Mus musculus
cucguuuucagaguugg

SEQ ID NO: 2705 - RNA, 17 nt, Mus musculus
uucagaguugguggagc

SEQ ID NO: 2706 - RNA, 17 nt, Mus musculus
uggagcauuugggaaac

SEQ ID NO: 2707 - RNA, 17 nt, Mus musculus
ggagcauuugggaaacc

SEQ ID NO: 2708 - RNA, 17 nt, Mus musculus
ggaaaccuccugcaagc

SEQ ID NO: 2709 - RNA, 17 nt, Mus musculus
caaagacuauauuguuc

SEQ ID NO: 2710 - RNA, 17 nt, Mus musculus
aagacuauauuguucuu

SEQ ID NO: 2711 - RNA, 17 nt, Mus musculus
gacuauauuguucuucc

SEQ ID NO: 2712 - RNA, 17 nt, Mus musculus
uauauuguucuuccaau

SEQ ID NO: 2713 - RNA, 17 nt, Mus musculus
auauuguucuuccaaug

SEQ ID NO: 2714 - RNA, 17 nt, Mus musculus
auuguucuuccaauguc

SEQ ID NO: 2715 - RNA, 17 nt, Mus musculus
uuguucuuccaauguca

SEQ ID NO: 2716 - RNA, 17 nt, Mus musculus
uccaaugucagagacac

SEQ ID NO: 2717 - RNA, 17 nt, Mus musculus
ucuggacucucccugcc

SEQ ID NO: 2718 - RNA, 17 nt, Mus musculus
uggacucucccugccua

SEQ ID NO: 2719 - RNA, 17 nt, Mus musculus
cccugccuaccucaccu

SEQ ID NO: 2720 - RNA, 17 nt, Mus musculus
uuuccuguauggaggaa

SEQ ID NO: 2721 - RNA, 17 nt, Mus musculus
gcaggaaucagucauua

SEQ ID NO: 2722 - RNA, 17 nt, Mus musculus
gaaucagucauuaucuc

SEQ ID NO: 2723 - RNA, 17 nt, Mus musculus
ucagucauuaucuccag

SEQ ID NO: 2724 - RNA, 17 nt, Mus musculus
cagucauuaucuccaga

SEQ ID NO: 2725 - RNA, 17 nt, Mus musculus
gucauuaucuccagaac

SEQ ID NO: 2726 - RNA, 17 nt, Mus musculus
cauuaucuccagaacag

SEQ ID NO: 2727 - RNA, 17 nt, Mus musculus
uugaagauaucccauug

SEQ ID NO: 2728 - RNA, 17 nt, Mus musculus
gaagauaucccauugga

SEQ ID NO: 2729 - RNA, 17 nt, Mus musculus
uaucccauuggaggaac

SEQ ID NO: 2730 - RNA, 17 nt, Mus musculus
ccagaaguaaaagugau

SEQ ID NO: 2731 - RNA, 17 nt, Mus musculus
aaagugaucccagauga

SEQ ID NO: 2732 - RNA, 17 nt, Mus musculus
gggaugguccuugcauc

SEQ ID NO: 2733 - RNA, 17 nt, Mus musculus
augguccuugcaucaga

SEQ ID NO: 2734 - RNA, 17 nt, Mus musculus
ccuugcaucagaagagc

SEQ ID NO: 2735 - RNA, 17 nt, Mus musculus
ugaaaacucuggaagac

SEQ ID NO: 2736 - RNA, 17 nt, Mus musculus
gaacaaauuaucuccau

SEQ ID NO: 2737 - RNA, 17 nt, Mus musculus
aacaaauuaucuccauc

SEQ ID NO: 2738 - RNA, 17 nt, Mus musculus
ugcccaguaaaagcagg

SEQ ID NO: 2739 - RNA, 17 nt, Mus musculus
cagggagucuguggccu

SEQ ID NO: 2740 - RNA, 17 nt, Mus musculus
uguggccucggaaggcu

SEQ ID NO: 2741 - RNA, 17 nt, Mus musculus
ggaaggcuccaaccaga

SEQ ID NO: 2742 - RNA, 17 nt, Mus musculus
caguggcuaccagucug

SEQ ID NO: 2743 - RNA, 17 nt, Mus musculus
cuaccagucuggguauc

SEQ ID NO: 2744 - RNA, 17 nt, Mus musculus
gucuggguaucacucag

SEQ ID NO: 2745 - RNA, 17 nt, Mus musculus
cuggguaucacucagau

SEQ ID NO: 2746 - RNA, 17 nt, Mus musculus
guaucacucagaugaca

SEQ ID NO: 2747 - RNA, 17 nt, Mus musculus
caccguguacuccagcg

SEQ ID NO: 2748 - RNA, 17 nt, Mus musculus
cguguacuccagcgacg

SEQ ID NO: 2749 - RNA, 17 nt, Mus musculus
gcaggacuuuuaaagau

SEQ ID NO: 2750 - RNA, 17 nt, Mus musculus
caggacuuuuaaagaug

SEQ ID NO: 2751 - RNA, 17 nt, Mus musculus
aggacuuuuaaagaugg

SEQ ID NO: 2752 - RNA, 17 nt, Mus musculus
ggacuuuuaaagauggu

SEQ ID NO: 2753 - RNA, 17 nt, Mus musculus
gcugcaguucacgcuga

SEQ ID NO: 2754 - RNA, 17 nt, Mus musculus
cugcaguucacgcugac

SEQ ID NO: 2755 - RNA, 17 nt, Mus musculus
cgcugacucagggacca

SEQ ID NO: 2756 - RNA, 17 nt, Mus musculus
cugcagcucaccuccug

SEQ ID NO: 2757 - RNA, 17 nt, Mus musculus
gcucaccuccuguuuaa

SEQ ID NO: 2758 - RNA, 17 nt, Mus musculus
ccuccuguuuaaaugga

SEQ ID NO: 2759 - RNA, 17 nt, Mus musculus
cuccuguuuaaauggaa

SEQ ID NO: 2760 - RNA, 17 nt, Mus musculus
uccuguuuaaauggaag

SEQ ID NO: 2761 - RNA, 17 nt, Mus musculus
gaagugguccugucccg

SEQ ID NO: 2762 - RNA, 17 nt, Mus musculus
gguccugucccggcucc

SEQ ID NO: 2763 - RNA, 17 nt, Mus musculus
ucccggcuccgccccca

SEQ ID NO: 2764 - RNA, 17 nt, Mus musculus
ccccaacuccuggaaau

SEQ ID NO: 2765 - RNA, 17 nt, Mus musculus
cuggaaaucacgagaga

SEQ ID NO: 2766 - RNA, 17 nt, Mus musculus
gugcugcuuagauuuuc

SEQ ID NO: 2767 - RNA, 17 nt, Mus musculus
ugcugcuuagauuuuca

SEQ ID NO: 2768 - RNA, 17 nt, Mus musculus
gcuuagauuuucaagug

SEQ ID NO: 2769 - RNA, 17 nt, Mus musculus
cuuagauuuucaagugu

SEQ ID NO: 2770 - RNA, 17 nt, Mus musculus
uuagauuuucaaguguu

SEQ ID NO: 2771 - RNA, 17 nt, Mus musculus
uagauuuucaaguguug

SEQ ID NO: 2772 - RNA, 17 nt, Mus musculus
ucaaguguuguucuuuc

SEQ ID NO: 2773 - RNA, 17 nt, Mus musculus
guuguucuuuccaccac

SEQ ID NO: 2774 - RNA, 17 nt, Mus musculus
uuguucuuuccaccacc

SEQ ID NO: 2775 - RNA, 17 nt, Mus musculus
uguucuuuccaccaccc

SEQ ID NO: 2776 - RNA, 17 nt, Mus musculus
ccggaaguagccacauu

SEQ ID NO: 2777 - RNA, 17 nt, Mus musculus
agccacauuugauuuuc

SEQ ID NO: 2778 - RNA, 17 nt, Mus musculus
gccacauuugauuuuca

SEQ ID NO: 2779 - RNA, 17 nt, Mus musculus
cauuugauuuucauuuu

SEQ ID NO: 2780 - RNA, 17 nt, Mus musculus
auuugauuuucauuuuu

SEQ ID NO: 2781 - RNA, 17 nt, Mus musculus
uuugauuuucauuuuug

SEQ ID NO: 2782 - RNA, 17 nt, Mus musculus
uugauuuucauuuuugg

SEQ ID NO: 2783 - RNA, 17 nt, Mus musculus
auuuucauuuuuggagg

SEQ ID NO: 2784 - RNA, 17 nt, Mus musculus
uuuucauuuuuggagga

SEQ ID NO: 2785 - RNA, 17 nt, Mus musculus
uuucauuuuuggaggag

SEQ ID NO: 2786 - RNA, 17 nt, Mus musculus
uucauuuuuggaggagg

SEQ ID NO: 2787 - RNA, 17 nt, Mus musculus
agggaccucagacugca

SEQ ID NO: 2788 - RNA, 17 nt, Mus musculus
aaggagcuuguccucag

SEQ ID NO: 2789 - RNA, 17 nt, Mus musculus
gagcuuguccucagggc

SEQ ID NO: 2790 - RNA, 17 nt, Mus musculus
cuuguccucagggcauu

SEQ ID NO: 2791 - RNA, 17 nt, Mus musculus
cagggcauuuccagaga

SEQ ID NO: 2792 - RNA, 17 nt, Mus musculus
agggcauuuccagagaa

SEQ ID NO: 2793 - RNA, 17 nt, Mus musculus
gggcauuuccagagaag

SEQ ID NO: 2794 - RNA, 17 nt, Mus musculus
gaauguguugacucuac

SEQ ID NO: 2795 - RNA, 17 nt, Mus musculus
uguugacucuacucucu

SEQ ID NO: 2796 - RNA, 17 nt, Mus musculus
uugacucuacucucuuu

SEQ ID NO: 2797 - RNA, 17 nt, Mus musculus
acucuacucucuuuucc

SEQ ID NO: 2798 - RNA, 17 nt, Mus musculus
ucuacucucuuuuccau

SEQ ID NO: 2799 - RNA, 17 nt, Mus musculus
uacucucuuuuccauuc

SEQ ID NO: 2800 - RNA, 17 nt, Mus musculus
acucucuuuuccauuca

SEQ ID NO: 2801 - RNA, 17 nt, Mus musculus
cucucuuuuccauucau

SEQ ID NO: 2802 - RNA, 17 nt, Mus musculus
ucucuuuuccauucauu

SEQ ID NO: 2803 - RNA, 17 nt, Mus musculus
uuuuccauucauuuaaa

SEQ ID NO: 2804 - RNA, 17 nt, Mus musculus
uuuccauucauuuaaaa

SEQ ID NO: 2805 - RNA, 17 nt, Mus musculus
ccauucauuuaaaaguc

SEQ ID NO: 2806 - RNA, 17 nt, Mus musculus
cauucauuuaaaagucc

SEQ ID NO: 2807 - RNA, 17 nt, Mus musculus
auucauuuaaaaguccu

SEQ ID NO: 2808 - RNA, 17 nt, Mus musculus
uuaaaaguccuauauaa

SEQ ID NO: 2809 - RNA, 17 nt, Mus musculus
aaaguccuauauaaugu

SEQ ID NO: 2810 - RNA, 17 nt, Mus musculus
aguccuauauaaugugc

SEQ ID NO: 2811 - RNA, 17 nt, Mus musculus
uccuauauaaugugccc

SEQ ID NO: 2812 - RNA, 17 nt, Mus musculus
gcuguggucucacuacc

SEQ ID NO: 2813 - RNA, 17 nt, Mus musculus
uguggucucacuaccag

SEQ ID NO: 2814 - RNA, 17 nt, Mus musculus
gucucacuaccaguuaa

SEQ ID NO: 2815 - RNA, 17 nt, Mus musculus
cuaccaguuaaagcaaa

SEQ ID NO: 2816 - RNA, 17 nt, Mus musculus
uaccaguuaaagcaaaa

SEQ ID NO: 2817 - RNA, 17 nt, Mus musculus
aaaagacuuucaaacac

SEQ ID NO: 2818 - RNA, 17 nt, Mus musculus
aaagacuuucaaacacg

SEQ ID NO: 2819 - RNA, 17 nt, Mus musculus
aagacuuucaaacacgu

SEQ ID NO: 2820 - RNA, 17 nt, Mus musculus
cguggacucuguccucc

SEQ ID NO: 2821 - RNA, 17 nt, Mus musculus
gacucuguccuccaaga

SEQ ID NO: 2822 - RNA, 17 nt, Mus musculus
ucuguccuccaagaagu

SEQ ID NO: 2823 - RNA, 17 nt, Mus musculus
cggcaccucugugaaac

SEQ ID NO: 2824 - RNA, 17 nt, Mus musculus
aacuggaucgaaugggc

SEQ ID NO: 2825 - RNA, 17 nt, Mus musculus
gcaaugcuuuguguguu

SEQ ID NO: 2826 - RNA, 17 nt, Mus musculus
caaugcuuuguguguug

SEQ ID NO: 2827 - RNA, 17 nt, Mus musculus
uuguguguugaggaugg

SEQ ID NO: 2828 - RNA, 17 nt, Mus musculus
ugagaugucccagggcc

SEQ ID NO: 2829 - RNA, 17 nt, Mus musculus
ggccgagucugucuacc

SEQ ID NO: 2830 - RNA, 17 nt, Mus musculus
gagucugucuaccuugg

SEQ ID NO: 2831 - RNA, 17 nt, Mus musculus
gucugucuaccuuggag

SEQ ID NO: 2832 - RNA, 17 nt, Mus musculus
gucuaccuuggaggcuu

SEQ ID NO: 2833 - RNA, 17 nt, Mus musculus
uggaggcuuuguggagg

SEQ ID NO: 2834 - RNA, 17 nt, Mus musculus
ggaggcuuuguggagga

SEQ ID NO: 2835 - RNA, 17 nt, Mus musculus
ugcgggcuaugagccaa

SEQ ID NO: 2836 - RNA, 17 nt, Mus musculus
ccaaguguuaagugugg

SEQ ID NO: 2837 - RNA, 17 nt, Mus musculus
caaguguuaaguguggg

SEQ ID NO: 2838 - RNA, 17 nt, Mus musculus
gcgcaagucgcucggag

SEQ ID NO: 2839 - RNA, 17 nt, Mus musculus
aagucgcucggagagcg

SEQ ID NO: 2840 - RNA, 17 nt, Mus musculus
agagcgguuggagccug

SEQ ID NO: 2841 - RNA, 17 nt, Mus musculus
agaugcauugugcuggc

SEQ ID NO: 2842 - RNA, 17 nt, Mus musculus
ugcuggcucugguggag

SEQ ID NO: 2843 - RNA, 17 nt, Mus musculus
ggugggcuuguggccug

SEQ ID NO: 2844 - RNA, 17 nt, Mus musculus
uggccugucaggaaacg

SEQ ID NO: 2845 - RNA, 17 nt, Mus musculus
ggcaggguuugguuuug

SEQ ID NO: 2846 - RNA, 17 nt, Mus musculus
gcaggguuugguuuugg

SEQ ID NO: 2847 - RNA, 17 nt, Mus musculus
gguuugguuuuggaagg

SEQ ID NO: 2848 - RNA, 17 nt, Mus musculus
guuugguuuuggaaggu

SEQ ID NO: 2849 - RNA, 17 nt, Mus musculus
uuugguuuuggaagguu

SEQ ID NO: 2850 - RNA, 17 nt, Mus musculus
uggaagguuugcgugcu

SEQ ID NO: 2851 - RNA, 17 nt, Mus musculus
ggaagguuugcgugcuc

SEQ ID NO: 2852 - RNA, 17 nt, Mus musculus
ugcgugcucuucacagu

SEQ ID NO: 2853 - RNA, 17 nt, Mus musculus
cgugcucuucacagucg

SEQ ID NO: 2854 - RNA, 17 nt, Mus musculus
gugcucuucacagucgg

SEQ ID NO: 2855 - RNA, 17 nt, Mus musculus
uucacagucggguuaca

SEQ ID NO: 2856 - RNA, 17 nt, Mus musculus
agucggguuacaggcga

SEQ ID NO: 2857 - RNA, 17 nt, Mus musculus
gucggguuacaggcgag

SEQ ID NO: 2858 - RNA, 17 nt, Mus musculus
aggcgaguucccugugg

SEQ ID NO: 2859 - RNA, 17 nt, Mus musculus
ggcgaguucccuguggc

SEQ ID NO: 2860 - RNA, 17 nt, Mus musculus
uguggcguuuccuacuc

SEQ ID NO: 2861 - RNA, 17 nt, Mus musculus
guggcguuuccuacucc

SEQ ID NO: 2862 - RNA, 17 nt, Mus musculus
uggcguuuccuacuccu

SEQ ID NO: 2863 - RNA, 17 nt, Mus musculus
cguuuccuacuccuaau

SEQ ID NO: 2864 - RNA, 17 nt, Mus musculus
uuccuacuccuaaugag

SEQ ID NO: 2865 - RNA, 17 nt, Mus musculus
cuacuccuaaugagagu

SEQ ID NO: 2866 - RNA, 17 nt, Mus musculus
augagaguuccuuccgg

SEQ ID NO: 2867 - RNA, 17 nt, Mus musculus
ugagaguuccuuccgga

SEQ ID NO: 2868 - RNA, 17 nt, Mus musculus
gaguuccuuccggacuc

SEQ ID NO: 2869 - RNA, 17 nt, Mus musculus
aguuccuuccggacucu

SEQ ID NO: 2870 - RNA, 17 nt, Mus musculus
uccggacucuuacgugu

SEQ ID NO: 2871 - RNA, 17 nt, Mus musculus
cggacucuuacgugucu

SEQ ID NO: 2872 - RNA, 17 nt, Mus musculus
ggacucuuacgugucuc

SEQ ID NO: 2873 - RNA, 17 nt, Mus musculus
uuacgugucuccuggcc

SEQ ID NO: 2874 - RNA, 17 nt, Mus musculus
acgugucuccuggccug

SEQ ID NO: 2875 - RNA, 17 nt, Mus musculus
augcagcuugcuccuuc

SEQ ID NO: 2876 - RNA, 17 nt, Mus musculus
agcuugcuccuuccuca

SEQ ID NO: 2877 - RNA, 17 nt, Mus musculus
uugcuccuuccucaucu

SEQ ID NO: 2878 - RNA, 17 nt, Mus musculus
ugcuccuuccucaucuc

SEQ ID NO: 2879 - RNA, 17 nt, Mus musculus
uccuuccucaucucuca

SEQ ID NO: 2880 - RNA, 17 nt, Mus musculus
uuccucaucucucaggc

SEQ ID NO: 2881 - RNA, 17 nt, Mus musculus
ccucaucucucaggcug

SEQ ID NO: 2882 - RNA, 17 nt, Mus musculus
ucaucucucaggcugug

SEQ ID NO: 2883 - RNA, 17 nt, Mus musculus
cugugccuuaauucaga

SEQ ID NO: 2884 - RNA, 17 nt, Mus musculus
ugugccuuaauucagaa

SEQ ID NO: 2885 - RNA, 17 nt, Mus musculus
gccuuaauucagaacac

SEQ ID NO: 2886 - RNA, 17 nt, Mus musculus
ccuuaauucagaacacc

SEQ ID NO: 2887 - RNA, 17 nt, Mus musculus
aggaacgucggcagagg

SEQ ID NO: 2888 - RNA, 17 nt, Mus musculus
cagaggcuccugacggg

SEQ ID NO: 2889 - RNA, 17 nt, Mus musculus
cgaagaauugugagaac

SEQ ID NO: 2890 - RNA, 17 nt, Mus musculus
cagaaacucaggguuuc

SEQ ID NO: 2891 - RNA, 17 nt, Mus musculus
cucaggguuucugcugg

SEQ ID NO: 2892 - RNA, 17 nt, Mus musculus
ucaggguuucugcuggg

SEQ ID NO: 2893 - RNA, 17 nt, Mus musculus
caggguuucugcugggu

SEQ ID NO: 2894 - RNA, 17 nt, Mus musculus
uggcaggucugaggguu

SEQ ID NO: 2895 - RNA, 17 nt, Mus musculus
cugaggguucucuguca

SEQ ID NO: 2896 - RNA, 17 nt, Mus musculus
ugaggguucucugucaa

SEQ ID NO: 2897 - RNA, 17 nt, Mus musculus
aggguucucugucaagu

SEQ ID NO: 2898 - RNA, 17 nt, Mus musculus
uucucugucaaguggcg

SEQ ID NO: 2899 - RNA, 17 nt, Mus musculus
guggcgguaaaggcuca

SEQ ID NO: 2900 - RNA, 17 nt, Mus musculus
uaaaggcucaggcuggu

SEQ ID NO: 2901 - RNA, 17 nt, Mus musculus
gcugguguucuuccucu

SEQ ID NO: 2902 - RNA, 17 nt, Mus musculus
cugguguucuuccucua

SEQ ID NO: 2903 - RNA, 17 nt, Mus musculus
gguguucuuccucuauc

SEQ ID NO: 2904 - RNA, 17 nt, Mus musculus
guguucuuccucuaucu

SEQ ID NO: 2905 - RNA, 17 nt, Mus musculus
uucuuccucuaucucca

SEQ ID NO: 2906 - RNA, 17 nt, Mus musculus
cuuccucuaucuccacu

SEQ ID NO: 2907 - RNA, 17 nt, Mus musculus
uccucuaucuccacucc

SEQ ID NO: 2908 - RNA, 17 nt, Mus musculus
cucuaucuccacuccug

SEQ ID NO: 2909 - RNA, 17 nt, Mus musculus
ucuccacuccugucagg

SEQ ID NO: 2910 - RNA, 17 nt, Mus musculus
acuccugucaggccccc

SEQ ID NO: 2911 - RNA, 17 nt, Mus musculus
ccccaaguccucaguau

SEQ ID NO: 2912 - RNA, 17 nt, Mus musculus
caaguccucaguauuuu

SEQ ID NO: 2913 - RNA, 17 nt, Mus musculus
uccucaguauuuuagcu

SEQ ID NO: 2914 - RNA, 17 nt, Mus musculus
cucaguauuuuagcuuu

SEQ ID NO: 2915 - RNA, 17 nt, Mus musculus
ucaguauuuuagcuuug

SEQ ID NO: 2916 - RNA, 17 nt, Mus musculus
caguauuuuagcuuugu

SEQ ID NO: 2917 - RNA, 17 nt, Mus musculus
aguauuuuagcuuugug

SEQ ID NO: 2918 - RNA, 17 nt, Mus musculus
uuuuagcuuuguggcuu

SEQ ID NO: 2919 - RNA, 17 nt, Mus musculus
uuuagcuuuguggcuuc

SEQ ID NO: 2920 - RNA, 17 nt, Mus musculus
uuguggcuuccugaugg

SEQ ID NO: 2921 - RNA, 17 nt, Mus musculus
uguggcuuccugauggc

SEQ ID NO: 2922 - RNA, 17 nt, Mus musculus
agaaaaaucuuaauugg

SEQ ID NO: 2923 - RNA, 17 nt, Mus musculus
aaaaaucuuaauugguu

SEQ ID NO: 2924 - RNA, 17 nt, Mus musculus
aaaaucuuaauugguug

SEQ ID NO: 2925 - RNA, 17 nt, Mus musculus
aucuuaauugguugguu

SEQ ID NO: 2926 - RNA, 17 nt, Mus musculus
uaauugguugguuugcu

SEQ ID NO: 2927 - RNA, 17 nt, Mus musculus
ugguugguuugcucucc

SEQ ID NO: 2928 - RNA, 17 nt, Mus musculus
gguugguuugcucucca

SEQ ID NO: 2929 - RNA, 17 nt, Mus musculus
gguuugcucuccagaua

SEQ ID NO: 2930 - RNA, 17 nt, Mus musculus
uuugcucuccagauaau

SEQ ID NO: 2931 - RNA, 17 nt, Mus musculus
cuccagauaaucacuag

SEQ ID NO: 2932 - RNA, 17 nt, Mus musculus
cagauaaucacuagcca

SEQ ID NO: 2933 - RNA, 17 nt, Mus musculus
uaaucacuagccagauu

SEQ ID NO: 2934 - RNA, 17 nt, Mus musculus
agccagauuucgaaauu

SEQ ID NO: 2935 - RNA, 17 nt, Mus musculus
gccagauuucgaaauua

SEQ ID NO: 2936 - RNA, 17 nt, Mus musculus
ccagauuucgaaauuac

SEQ ID NO: 2937 - RNA, 17 nt, Mus musculus
uucgaaauuacuuuuua

SEQ ID NO: 2938 - RNA, 17 nt, Mus musculus
ucgaaauuacuuuuuag

SEQ ID NO: 2939 - RNA, 17 nt, Mus musculus
aaauuacuuuuuagccg

SEQ ID NO: 2940 - RNA, 17 nt, Mus musculus
aauuacuuuuuagccga

SEQ ID NO: 2941 - RNA, 17 nt, Mus musculus
auuacuuuuuagccgag

SEQ ID NO: 2942 - RNA, 17 nt, Mus musculus
uuacuuuuuagccgagg

SEQ ID NO: 2943 - RNA, 17 nt, Mus musculus
uacuuuuuagccgaggu

SEQ ID NO: 2944 - RNA, 17 nt, Mus musculus
gccgagguuaugauaac

SEQ ID NO: 2945 - RNA, 17 nt, Mus musculus
ccgagguuaugauaaca

SEQ ID NO: 2946 - RNA, 17 nt, Mus musculus
guuaugauaacaucuac

SEQ ID NO: 2947 - RNA, 17 nt, Mus musculus
gauaacaucuacuguau

SEQ ID NO: 2948 - RNA, 17 nt, Mus musculus
uaacaucuacuguaucc

SEQ ID NO: 2949 - RNA, 17 nt, Mus musculus
ucuacuguauccuuuag

SEQ ID NO: 2950 - RNA, 17 nt, Mus musculus
uacuguauccuuuagaa

SEQ ID NO: 2951 - RNA, 17 nt, Mus musculus
uguauccuuuagaauuu

SEQ ID NO: 2952 - RNA, 17 nt, Mus musculus
guauccuuuagaauuuu

SEQ ID NO: 2953 - RNA, 17 nt, Mus musculus
uauccuuuagaauuuua

SEQ ID NO: 2954 - RNA, 17 nt, Mus musculus
uuuagaauuuuaaccua

SEQ ID NO: 2955 - RNA, 17 nt, Mus musculus
uuagaauuuuaaccuau

SEQ ID NO: 2956 - RNA, 17 nt, Mus musculus
uagaauuuuaaccuaua

SEQ ID NO: 2957 - RNA, 17 nt, Mus musculus
agaauuuuaaccuauaa

SEQ ID NO: 2958 - RNA, 17 nt, Mus musculus
uuuaaccuauaaaacua

SEQ ID NO: 2959 - RNA, 17 nt, Mus musculus
uaaccuauaaaacuaug

SEQ ID NO: 2960 - RNA, 17 nt, Mus musculus
auaaaacuaugucuacu

SEQ ID NO: 2961 - RNA, 17 nt, Mus musculus
aacuaugucuacugguu

SEQ ID NO: 2962 - RNA, 17 nt, Mus musculus
cuaugucuacugguuuc

SEQ ID NO: 2963 - RNA, 17 nt, Mus musculus
cuacugguuucugccug

SEQ ID NO: 2964 - RNA, 17 nt, Mus musculus
uacugguuucugccugu

SEQ ID NO: 2965 - RNA, 17 nt, Mus musculus
acugguuucugccugug

SEQ ID NO: 2966 - RNA, 18 nt, Mus musculus
gggcccagacuguguccc

SEQ ID NO: 2967 - RNA, 18 nt, Mus musculus
ucccgcagccgggauaac

SEQ ID NO: 2968 - RNA, 18 nt, Mus musculus
ccuggcugacccgauucc

SEQ ID NO: 2969 - RNA, 18 nt, Mus musculus
cugacccgauuccgcgga

SEQ ID NO: 2970 - RNA, 18 nt, Mus musculus
ggacaccgcugacagccg

SEQ ID NO: 2971 - RNA, 18 nt, Mus musculus
gcugacagccgcggcugg

SEQ ID NO: 2972 - RNA, 18 nt, Mus musculus
agccgcggcuggagccag

SEQ ID NO: 2973 - RNA, 18 nt, Mus musculus
cuccccggucuugcgcug

SEQ ID NO: 2974 - RNA, 18 nt, Mus musculus
ccauaccgccucugugac

SEQ ID NO: 2975 - RNA, 18 nt, Mus musculus
gcuagcugucgcucugug

SEQ ID NO: 2976 - RNA, 18 nt, Mus musculus
ccgagccgccucuguggg

SEQ ID NO: 2977 - RNA, 18 nt, Mus musculus
cccuucagauuacuugca

SEQ ID NO: 2978 - RNA, 18 nt, Mus musculus
cuccacuguuuaugucua

SEQ ID NO: 2979 - RNA, 18 nt, Mus musculus
gauuacagaucaccauuc

SEQ ID NO: 2980 - RNA, 18 nt, Mus musculus
auccccugccgagggucg

SEQ ID NO: 2981 - RNA, 18 nt, Mus musculus
uguuccggauggaaacag

SEQ ID NO: 2982 - RNA, 18 nt, Mus musculus
ccuaucagucuaucaugu

SEQ ID NO: 2983 - RNA, 18 nt, Mus musculus
gcuaucugccggagaaaa

SEQ ID NO: 2984 - RNA, 18 nt, Mus musculus
guggacggaugaucaaga

SEQ ID NO: 2985 - RNA, 18 nt, Mus musculus
uuacccagcuccugauau

SEQ ID NO: 2986 - RNA, 18 nt, Mus musculus
caccccagaucggugaga

SEQ ID NO: 2987 - RNA, 18 nt, Mus musculus
augcacagucuacgccaa

SEQ ID NO: 2988 - RNA, 18 nt, Mus musculus
gaagccugcuccuacaga

SEQ ID NO: 2989 - RNA, 18 nt, Mus musculus
uccuacagacccggccaa

SEQ ID NO: 2990 - RNA, 18 nt, Mus musculus
augcccugauugaaggaa

SEQ ID NO: 2991 - RNA, 18 nt, Mus musculus
gcaaccugcugcccagcc

SEQ ID NO: 2992 - RNA, 18 nt, Mus musculus
accugcugcccagccaac

SEQ ID NO: 2993 - RNA, 18 nt, Mus musculus
ugucccuguugugcacug

SEQ ID NO: 2994 - RNA, 18 nt, Mus musculus
aacaucgguccacauggg

SEQ ID NO: 2995 - RNA, 18 nt, Mus musculus
cacaccaguuugcaagaa

SEQ ID NO: 2996 - RNA, 18 nt, Mus musculus
uugcucugcucaagauaa

SEQ ID NO: 2997 - RNA, 18 nt, Mus musculus
ucaaacagcucaucaucc

SEQ ID NO: 2998 - RNA, 18 nt, Mus musculus
ggaaccugacuauccgca

SEQ ID NO: 2999 - RNA, 18 nt, Mus musculus
uccuacggaccguuaagc

SEQ ID NO: 3000 - RNA, 18 nt, Mus musculus
ggauccagaugaauugcc

SEQ ID NO: 3001 - RNA, 18 nt, Mus musculus
gggaccggcugaaacuag

SEQ ID NO: 3002 - RNA, 18 nt, Mus musculus
ugaggcagacgcuuuugg

SEQ ID NO: 3003 - RNA, 18 nt, Mus musculus
ucugccagcucaggcuuu

SEQ ID NO: 3004 - RNA, 18 nt, Mus musculus
gacuucggcuuggcccgg

SEQ ID NO: 3005 - RNA, 18 nt, Mus musculus
agacccggauuaugucag

SEQ ID NO: 3006 - RNA, 18 nt, Mus musculus
gaugcccgacucccuuug

SEQ ID NO: 3007 - RNA, 18 nt, Mus musculus
ggcuccugacuacacuac

SEQ ID NO: 3008 - RNA, 18 nt, Mus musculus
cuggacugcuggcaugag

SEQ ID NO: 3009 - RNA, 18 nt, Mus musculus
ucucccugccuaccucac

SEQ ID NO: 3010 - RNA, 18 nt, Mus musculus
gaucccagaugacagcca

SEQ ID NO: 3011 - RNA, 18 nt, Mus musculus
ccaaccagaccaguggcu

SEQ ID NO: 3012 - RNA, 18 nt, Mus musculus
gcuaccagucuggguauc

SEQ ID NO: 3013 - RNA, 18 nt, Mus musculus
ucacucagaugacacaga

SEQ ID NO: 3014 - RNA, 18 nt, Mus musculus
ugcugcaguucacgcuga

SEQ ID NO: 3015 - RNA, 18 nt, Mus musculus
ucacgcugacucagggac

SEQ ID NO: 3016 - RNA, 18 nt, Mus musculus
cacugcagcucaccuccu

SEQ ID NO: 3017 - RNA, 18 nt, Mus musculus
accuccuguuuaaaugga

SEQ ID NO: 3018 - RNA, 18 nt, Mus musculus
ugguccugucccggcucc

SEQ ID NO: 3019 - RNA, 18 nt, Mus musculus
ugucccggcuccgccccc

SEQ ID NO: 3020 - RNA, 18 nt, Mus musculus
cggcuccgcccccaacuc

SEQ ID NO: 3021 - RNA, 18 nt, Mus musculus
aggugcugcuuagauuuu

SEQ ID NO: 3022 - RNA, 18 nt, Mus musculus
gaccucagacugcaagga

SEQ ID NO: 3023 - RNA, 18 nt, Mus musculus
gugcccugcuguggucuc

SEQ ID NO: 3024 - RNA, 18 nt, Mus musculus
ggacucuguccuccaaga

SEQ ID NO: 3025 - RNA, 18 nt, Mus musculus
cgagucugucuaccuugg

SEQ ID NO: 3026 - RNA, 18 nt, Mus musculus
gagagcgguuggagccug

SEQ ID NO: 3027 - RNA, 18 nt, Mus musculus
gccugcagaugcauugug

SEQ ID NO: 3028 - RNA, 18 nt, Mus musculus
aaaggcggccggcagggu

SEQ ID NO: 3029 - RNA, 18 nt, Mus musculus
cuucacagucggguuaca

SEQ ID NO: 3030 - RNA, 18 nt, Mus musculus
ccuuccggacucuuacgu

SEQ ID NO: 3031 - RNA, 18 nt, Mus musculus
ugaugcagcuugcuccuu

SEQ ID NO: 3032 - RNA, 18 nt, Mus musculus
ggcuccugacggggccga

SEQ ID NO: 3033 - RNA, 18 nt, Mus musculus
gguuucugcuggguggag

SEQ ID NO: 3034 - RNA, 18 nt, Mus musculus
gcuuccugauggcagaaa

SEQ ID NO: 3035 - RNA, 18 nt, Mus musculus
cuagccagauuucgaaau

SEQ ID NO: 3036 - RNA, 18 nt, Mus musculus
gguuucugccugugugcu

SEQ ID NO: 3037 - RNA, 17 nt, Mus musculus
ggccgcgucuugcucac

SEQ ID NO: 3038 - RNA, 17 nt, Mus musculus
ccgcgucuugcucacca

SEQ ID NO: 3039 - RNA, 17 nt, Mus musculus
gucuugcucaccauggu

SEQ ID NO: 3040 - RNA, 17 nt, Mus musculus
accauggucagcugcug

SEQ ID NO: 3041 - RNA, 17 nt, Mus musculus
accgcggucuugccuua

SEQ ID NO: 3042 - RNA, 17 nt, Mus musculus
cgcggucuugccuuacg

SEQ ID NO: 3043 - RNA, 17 nt, Mus musculus
ucuugccuuacgcgcug

SEQ ID NO: 3044 - RNA, 17 nt, Mus musculus
cuugccuuacgcgcugc

SEQ ID NO: 3045 - RNA, 17 nt, Mus musculus
gcgcugcucgggugucu

SEQ ID NO: 3046 - RNA, 17 nt, Mus musculus
ucgggugucugcuucuc

SEQ ID NO: 3047 - RNA, 17 nt, Mus musculus
cugcuucucacaggaua

SEQ ID NO: 3048 - RNA, 17 nt, Mus musculus
cacaggauauggcucag

SEQ ID NO: 3049 - RNA, 17 nt, Mus musculus
auauggcucagggucga

SEQ ID NO: 3050 - RNA, 17 nt, Mus musculus
cucagggucgaaguuaa

SEQ ID NO: 3051 - RNA, 17 nt, Mus musculus
gucgaaguuaaaagugc

SEQ ID NO: 3052 - RNA, 17 nt, Mus musculus
ucgaaguuaaaagugcc

SEQ ID NO: 3053 - RNA, 17 nt, Mus musculus
cagcaugucaugcaagc

SEQ ID NO: 3054 - RNA, 17 nt, Mus musculus
gccagacucucuuucuc

SEQ ID NO: 3055 - RNA, 17 nt, Mus musculus
cagacucucuuucucaa

SEQ ID NO: 3056 - RNA, 17 nt, Mus musculus
gacucucuuucucaagu

SEQ ID NO: 3057 - RNA, 17 nt, Mus musculus
acucucuuucucaagug

SEQ ID NO: 3058 - RNA, 17 nt, Mus musculus
cucucuuucucaagugc

SEQ ID NO: 3059 - RNA, 17 nt, Mus musculus
cucuuucucaagugcag

SEQ ID NO: 3060 - RNA, 17 nt, Mus musculus
agcccacucauggucuc

SEQ ID NO: 3061 - RNA, 17 nt, Mus musculus
cucauggucucugccca

SEQ ID NO: 3062 - RNA, 17 nt, Mus musculus
cauggucucugcccacg

SEQ ID NO: 3063 - RNA, 17 nt, Mus musculus
cugagcaucacuccccc

SEQ ID NO: 3064 - RNA, 17 nt, Mus musculus
gcaucacucccccaucg

SEQ ID NO: 3065 - RNA, 17 nt, Mus musculus
ucccccaucggccugug

SEQ ID NO: 3066 - RNA, 17 nt, Mus musculus
ggagggauaacaggcaa

SEQ ID NO: 3067 - RNA, 17 nt, Mus musculus
caggcaauucugcagca

SEQ ID NO: 3068 - RNA, 17 nt, Mus musculus
aggcaauucugcagcac

SEQ ID NO: 3069 - RNA, 17 nt, Mus musculus
cagcaccuugaccuugg

SEQ ID NO: 3070 - RNA, 17 nt, Mus musculus
cuugaccuuggacacgg

SEQ ID NO: 3071 - RNA, 17 nt, Mus musculus
acgggccucuacaccug

SEQ ID NO: 3072 - RNA, 17 nt, Mus musculus
gggccucuacaccugua

SEQ ID NO: 3073 - RNA, 17 nt, Mus musculus
acaccuguagauaccuc

SEQ ID NO: 3074 - RNA, 17 nt, Mus musculus
cuguagauaccucccua

SEQ ID NO: 3075 - RNA, 17 nt, Mus musculus
agauaccucccuacauc

SEQ ID NO: 3076 - RNA, 17 nt, Mus musculus
accucccuacaucuacu

SEQ ID NO: 3077 - RNA, 17 nt, Mus musculus
cccuacaucuacuucga

SEQ ID NO: 3078 - RNA, 17 nt, Mus musculus
cuacaucuacuucgaag

SEQ ID NO: 3079 - RNA, 17 nt, Mus musculus
caucuacuucgaagaaa

SEQ ID NO: 3080 - RNA, 17 nt, Mus musculus
aucuacuucgaagaaaa

SEQ ID NO: 3081 - RNA, 17 nt, Mus musculus
agcggaaucuucaaucu

SEQ ID NO: 3082 - RNA, 17 nt, Mus musculus
cggaaucuucaaucuac

SEQ ID NO: 3083 - RNA, 17 nt, Mus musculus
ggaaucuucaaucuaca

SEQ ID NO: 3084 - RNA, 17 nt, Mus musculus
ucuucaaucuacauauu

SEQ ID NO: 3085 - RNA, 17 nt, Mus musculus
uucaaucuacauauuug

SEQ ID NO: 3086 - RNA, 17 nt, Mus musculus
aucuacauauuuguuag

SEQ ID NO: 3087 - RNA, 17 nt, Mus musculus
cuacauauuuguuagug

SEQ ID NO: 3088 - RNA, 17 nt, Mus musculus
uacauauuuguuaguga

SEQ ID NO: 3089 - RNA, 17 nt, Mus musculus
auauuuguuagugaugc

SEQ ID NO: 3090 - RNA, 17 nt, Mus musculus
uauuuguuagugaugca

SEQ ID NO: 3091 - RNA, 17 nt, Mus musculus
cagggaguccuuucaua

SEQ ID NO: 3092 - RNA, 17 nt, Mus musculus
ggaguccuuucauagag

SEQ ID NO: 3093 - RNA, 17 nt, Mus musculus
gaguccuuucauagaga

SEQ ID NO: 3094 - RNA, 17 nt, Mus musculus
aguccuuucauagagau

SEQ ID NO: 3095 - RNA, 17 nt, Mus musculus
ccuuucauagagaugca

SEQ ID NO: 3096 - RNA, 17 nt, Mus musculus
acugacauacccaaacu

SEQ ID NO: 3097 - RNA, 17 nt, Mus musculus
cccaaacuugugcacau

SEQ ID NO: 3098 - RNA, 17 nt, Mus musculus
agacagcucaucauccc

SEQ ID NO: 3099 - RNA, 17 nt, Mus musculus
cagcucaucauccccug

SEQ ID NO: 3100 - RNA, 17 nt, Mus musculus
cucaucauccccugccg

SEQ ID NO: 3101 - RNA, 17 nt, Mus musculus
ggugacgucacccaacg

SEQ ID NO: 3102 - RNA, 17 nt, Mus musculus
cccaacgucacagucac

SEQ ID NO: 3103 - RNA, 17 nt, Mus musculus
gucacagucacccuaaa

SEQ ID NO: 3104 - RNA, 17 nt, Mus musculus
gucacccuaaaaaaguu

SEQ ID NO: 3105 - RNA, 17 nt, Mus musculus
aaaaaaguuuccauuug

SEQ ID NO: 3106 - RNA, 17 nt, Mus musculus
aaaaaguuuccauuuga

SEQ ID NO: 3107 - RNA, 17 nt, Mus musculus
aaaaguuuccauuugau

SEQ ID NO: 3108 - RNA, 17 nt, Mus musculus
guuuccauuugauacuc

SEQ ID NO: 3109 - RNA, 17 nt, Mus musculus
uuuccauuugauacucu

SEQ ID NO: 3110 - RNA, 17 nt, Mus musculus
cauuugauacucuuacc

SEQ ID NO: 3111 - RNA, 17 nt, Mus musculus
uugauacucuuaccccu

SEQ ID NO: 3112 - RNA, 17 nt, Mus musculus
gauacucuuaccccuga

SEQ ID NO: 3113 - RNA, 17 nt, Mus musculus
auacucuuaccccugau

SEQ ID NO: 3114 - RNA, 17 nt, Mus musculus
caaagaauaacauggga

SEQ ID NO: 3115 - RNA, 17 nt, Mus musculus
gggacaguaggagaggc

SEQ ID NO: 3116 - RNA, 17 nt, Mus musculus
gagaggcuuuauaauag

SEQ ID NO: 3117 - RNA, 17 nt, Mus musculus
agaggcuuuauaauagc

SEQ ID NO: 3118 - RNA, 17 nt, Mus musculus
gaggcuuuauaauagca

SEQ ID NO: 3119 - RNA, 17 nt, Mus musculus
ggcuuuauaauagcaaa

SEQ ID NO: 3120 - RNA, 17 nt, Mus musculus
uuuauaauagcaaaugc

SEQ ID NO: 3121 - RNA, 17 nt, Mus musculus
ugcaacguacaaagaga

SEQ ID NO: 3122 - RNA, 17 nt, Mus musculus
aaagagauaggacugcu

SEQ ID NO: 3123 - RNA, 17 nt, Mus musculus
gccaccgucaacgggca

SEQ ID NO: 3124 - RNA, 17 nt, Mus musculus
gcaccuguaccagacaa

SEQ ID NO: 3125 - RNA, 17 nt, Mus musculus
gacaaacuaucugaccc

SEQ ID NO: 3126 - RNA, 17 nt, Mus musculus
caaacuaucugacccau

SEQ ID NO: 3127 - RNA, 17 nt, Mus musculus
ugacccaucggcagacc

SEQ ID NO: 3128 - RNA, 17 nt, Mus musculus
agaccaauacaauccua

SEQ ID NO: 3129 - RNA, 17 nt, Mus musculus
aauacaauccuagaugu

SEQ ID NO: 3130 - RNA, 17 nt, Mus musculus
acaauccuagaugucca

SEQ ID NO: 3131 - RNA, 17 nt, Mus musculus
cuagauguccaaauacg

SEQ ID NO: 3132 - RNA, 17 nt, Mus musculus
guccaaauacgcccgcc

SEQ ID NO: 3133 - RNA, 17 nt, Mus musculus
agacugcuccacgggca

SEQ ID NO: 3134 - RNA, 17 nt, Mus musculus
ggcagacucuuguccuc

SEQ ID NO: 3135 - RNA, 17 nt, Mus musculus
cagacucuuguccucaa

SEQ ID NO: 3136 - RNA, 17 nt, Mus musculus
acucuuguccucaacug

SEQ ID NO: 3137 - RNA, 17 nt, Mus musculus
cuuguccucaacugcac

SEQ ID NO: 3138 - RNA, 17 nt, Mus musculus
acggagcucaauacgag

SEQ ID NO: 3139 - RNA, 17 nt, Mus musculus
agcucaauacgagggug

SEQ ID NO: 3140 - RNA, 17 nt, Mus musculus
gcuggaauuacccuggu

SEQ ID NO: 3141 - RNA, 17 nt, Mus musculus
cuggaauuacccuggua

SEQ ID NO: 3142 - RNA, 17 nt, Mus musculus
acccugguaaagcaacu

SEQ ID NO: 3143 - RNA, 17 nt, Mus musculus
aagcaacuaagagagca

SEQ ID NO: 3144 - RNA, 17 nt, Mus musculus
gagagcaucuauaaggc

SEQ ID NO: 3145 - RNA, 17 nt, Mus musculus
gagcaucuauaaggcag

SEQ ID NO: 3146 - RNA, 17 nt, Mus musculus
gcaucuauaaggcagcg

SEQ ID NO: 3147 - RNA, 17 nt, Mus musculus
cagcggauugaccggag

SEQ ID NO: 3148 - RNA, 17 nt, Mus musculus
ggagccauucccacaac

SEQ ID NO: 3149 - RNA, 17 nt, Mus musculus
gagccauucccacaaca

SEQ ID NO: 3150 - RNA, 17 nt, Mus musculus
caauguguuccacagug

SEQ ID NO: 3151 - RNA, 17 nt, Mus musculus
aauguguuccacagugu

SEQ ID NO: 3152 - RNA, 17 nt, Mus musculus
cacaguguucuuaagau

SEQ ID NO: 3153 - RNA, 17 nt, Mus musculus
acaguguucuuaagauc

SEQ ID NO: 3154 - RNA, 17 nt, Mus musculus
aguguucuuaagaucaa

SEQ ID NO: 3155 - RNA, 17 nt, Mus musculus
guguucuuaagaucaac

SEQ ID NO: 3156 - RNA, 17 nt, Mus musculus
cuuaagaucaacaaugu

SEQ ID NO: 3157 - RNA, 17 nt, Mus musculus
aaggggcucuacaccug

SEQ ID NO: 3158 - RNA, 17 nt, Mus musculus
ggggcucuacaccuguc

SEQ ID NO: 3159 - RNA, 17 nt, Mus musculus
acaccugucgcgugaag

SEQ ID NO: 3160 - RNA, 17 nt, Mus musculus
gaguggguccucguucc

SEQ ID NO: 3161 - RNA, 17 nt, Mus musculus
uggguccucguuccagu

SEQ ID NO: 3162 - RNA, 17 nt, Mus musculus
guccucguuccagucuu

SEQ ID NO: 3163 - RNA, 17 nt, Mus musculus
uccucguuccagucuuu

SEQ ID NO: 3164 - RNA, 17 nt, Mus musculus
guuccagucuuucaaca

SEQ ID NO: 3165 - RNA, 17 nt, Mus musculus
uccagucuuucaacacc

SEQ ID NO: 3166 - RNA, 17 nt, Mus musculus
ccagucuuucaacaccu

SEQ ID NO: 3167 - RNA, 17 nt, Mus musculus
cagucuuucaacaccuc

SEQ ID NO: 3168 - RNA, 17 nt, Mus musculus
caacaccuccgugcaug

SEQ ID NO: 3169 - RNA, 17 nt, Mus musculus
gcauguguaugaaaaag

SEQ ID NO: 3170 - RNA, 17 nt, Mus musculus
aaaaggauucaucagug

SEQ ID NO: 3171 - RNA, 17 nt, Mus musculus
aaaggauucaucagugu

SEQ ID NO: 3172 - RNA, 17 nt, Mus musculus
ggauucaucagugugaa

SEQ ID NO: 3173 - RNA, 17 nt, Mus musculus
ugaaacaucggaagcag

SEQ ID NO: 3174 - RNA, 17 nt, Mus musculus
aagacgguccuaucggc

SEQ ID NO: 3175 - RNA, 17 nt, Mus musculus
acgguccuaucggcugu

SEQ ID NO: 3176 - RNA, 17 nt, Mus musculus
gguccuaucggcugucc

SEQ ID NO: 3177 - RNA, 17 nt, Mus musculus
ucggcuguccaugaaag

SEQ ID NO: 3178 - RNA, 17 nt, Mus musculus
gaaggccuuccccuccc

SEQ ID NO: 3179 - RNA, 17 nt, Mus musculus
aaggccuuccccucccc

SEQ ID NO: 3180 - RNA, 17 nt, Mus musculus
cuuccccuccccagaaa

SEQ ID NO: 3181 - RNA, 17 nt, Mus musculus
ccagaaaucguaugguu

SEQ ID NO: 3182 - RNA, 17 nt, Mus musculus
gaaaucguaugguuaaa

SEQ ID NO: 3183 - RNA, 17 nt, Mus musculus
cguaugguuaaaagaug

SEQ ID NO: 3184 - RNA, 17 nt, Mus musculus
agauggcucgccugcaa

SEQ ID NO: 3185 - RNA, 17 nt, Mus musculus
ugcaacauugaagucug

SEQ ID NO: 3186 - RNA, 17 nt, Mus musculus
auugaagucugcucgcu

SEQ ID NO: 3187 - RNA, 17 nt, Mus musculus
agucugcucgcuauuug

SEQ ID NO: 3188 - RNA, 17 nt, Mus musculus
ugcucgcuauuugguac

SEQ ID NO: 3189 - RNA, 17 nt, Mus musculus
cucgcuauuugguacau

SEQ ID NO: 3190 - RNA, 17 nt, Mus musculus
ucgcuauuugguacaug

SEQ ID NO: 3191 - RNA, 17 nt, Mus musculus
uauuugguacauggcua

SEQ ID NO: 3192 - RNA, 17 nt, Mus musculus
acauggcuacucauuaa

SEQ ID NO: 3193 - RNA, 17 nt, Mus musculus
uggcuacucauuaauua

SEQ ID NO: 3194 - RNA, 17 nt, Mus musculus
cuacucauuaauuauca

SEQ ID NO: 3195 - RNA, 17 nt, Mus musculus
uacucauuaauuaucaa

SEQ ID NO: 3196 - RNA, 17 nt, Mus musculus
ucauuaauuaucaaaga

SEQ ID NO: 3197 - RNA, 17 nt, Mus musculus
cauuaauuaucaaagau

SEQ ID NO: 3198 - RNA, 17 nt, Mus musculus
uuaauuaucaaagaugu

SEQ ID NO: 3199 - RNA, 17 nt, Mus musculus
aggggacuauacgaucu

SEQ ID NO: 3200 - RNA, 17 nt, Mus musculus
gggacuauacgaucuug

SEQ ID NO: 3201 - RNA, 17 nt, Mus musculus
uauacgaucuugcuggg

SEQ ID NO: 3202 - RNA, 17 nt, Mus musculus
uacgaucuugcugggca

SEQ ID NO: 3203 - RNA, 17 nt, Mus musculus
cugggcauaaagcaguc

SEQ ID NO: 3204 - RNA, 17 nt, Mus musculus
aaagcagucaaggcuau

SEQ ID NO: 3205 - RNA, 17 nt, Mus musculus
ucaaggcuauuuaaaaa

SEQ ID NO: 3206 - RNA, 17 nt, Mus musculus
aaggcuauuuaaaaacc

SEQ ID NO: 3207 - RNA, 17 nt, Mus musculus
aggcuauuuaaaaaccu

SEQ ID NO: 3208 - RNA, 17 nt, Mus musculus
ggcuauuuaaaaaccuc

SEQ ID NO: 3209 - RNA, 17 nt, Mus musculus
cugccacucucauugua

SEQ ID NO: 3210 - RNA, 17 nt, Mus musculus
gccacucucauuguaaa

SEQ ID NO: 3211 - RNA, 17 nt, Mus musculus
acucucauuguaaacgu

SEQ ID NO: 3212 - RNA, 17 nt, Mus musculus
cucauuguaaacgugaa

SEQ ID NO: 3213 - RNA, 17 nt, Mus musculus
ugaaaccucagaucuac

SEQ ID NO: 3214 - RNA, 17 nt, Mus musculus
ccucagaucuacgaaaa

SEQ ID NO: 3215 - RNA, 17 nt, Mus musculus
ucagaucuacgaaaagu

SEQ ID NO: 3216 - RNA, 17 nt, Mus musculus
cgaaaaguccguguccu

SEQ ID NO: 3217 - RNA, 17 nt, Mus musculus
guccguguccucgcuuc

SEQ ID NO: 3218 - RNA, 17 nt, Mus musculus
cguguccucgcuuccaa

SEQ ID NO: 3219 - RNA, 17 nt, Mus musculus
uccucgcuuccaagccc

SEQ ID NO: 3220 - RNA, 17 nt, Mus musculus
ccucgcuuccaagccca

SEQ ID NO: 3221 - RNA, 17 nt, Mus musculus
gcccaccucucuauccg

SEQ ID NO: 3222 - RNA, 17 nt, Mus musculus
ccaccucucuauccgcu

SEQ ID NO: 3223 - RNA, 17 nt, Mus musculus
accucucuauccgcugg

SEQ ID NO: 3224 - RNA, 17 nt, Mus musculus
cucucuauccgcugggc

SEQ ID NO: 3225 - RNA, 17 nt, Mus musculus
agacaaguccucacuug

SEQ ID NO: 3226 - RNA, 17 nt, Mus musculus
caaguccucacuugcac

SEQ ID NO: 3227 - RNA, 17 nt, Mus musculus
uccucacuugcaccgug

SEQ ID NO: 3228 - RNA, 17 nt, Mus musculus
caccguguauggcaucc

SEQ ID NO: 3229 - RNA, 17 nt, Mus musculus
uauggcaucccucggcc

SEQ ID NO: 3230 - RNA, 17 nt, Mus musculus
gcaucccucggccaaca

SEQ ID NO: 3231 - RNA, 17 nt, Mus musculus
ccaacaaucacguggcu

SEQ ID NO: 3232 - RNA, 17 nt, Mus musculus
acguggcucuggcaccc

SEQ ID NO: 3233 - RNA, 17 nt, Mus musculus
accccugucaccacaau

SEQ ID NO: 3234 - RNA, 17 nt, Mus musculus
accacaaucacuccaaa

SEQ ID NO: 3235 - RNA, 17 nt, Mus musculus
caaucacuccaaagaaa

SEQ ID NO: 3236 - RNA, 17 nt, Mus musculus
agaaagguaugacuucu

SEQ ID NO: 3237 - RNA, 17 nt, Mus musculus
guaugacuucugcacug

SEQ ID NO: 3238 - RNA, 17 nt, Mus musculus
uaugacuucugcacuga

SEQ ID NO: 3239 - RNA, 17 nt, Mus musculus
ugaagaauccuuuaucc

SEQ ID NO: 3240 - RNA, 17 nt, Mus musculus
agaauccuuuauccugg

SEQ ID NO: 3241 - RNA, 17 nt, Mus musculus
gaauccuuuauccugga

SEQ ID NO: 3242 - RNA, 17 nt, Mus musculus
aauccuuuauccuggau

SEQ ID NO: 3243 - RNA, 17 nt, Mus musculus
uccuuuauccuggaucc

SEQ ID NO: 3244 - RNA, 17 nt, Mus musculus
uccuggaucccagcagc

SEQ ID NO: 3245 - RNA, 17 nt, Mus musculus
cagcaacuuaggaaaca

SEQ ID NO: 3246 - RNA, 17 nt, Mus musculus
agcaacuuaggaaacag

SEQ ID NO: 3247 - RNA, 17 nt, Mus musculus
gagagcaucucucagcg

SEQ ID NO: 3248 - RNA, 17 nt, Mus musculus
gagcaucucucagcgca

SEQ ID NO: 3249 - RNA, 17 nt, Mus musculus
gcaucucucagcgcaug

SEQ ID NO: 3250 - RNA, 17 nt, Mus musculus
augacggucauagaagg

SEQ ID NO: 3251 - RNA, 17 nt, Mus musculus
acggucauagaaggaac

SEQ ID NO: 3252 - RNA, 17 nt, Mus musculus
gaacaaauaagacgguu

SEQ ID NO: 3253 - RNA, 17 nt, Mus musculus
aagacgguuagcacauu

SEQ ID NO: 3254 - RNA, 17 nt, Mus musculus
agacgguuagcacauug

SEQ ID NO: 3255 - RNA, 17 nt, Mus musculus
uagcacauugguggugg

SEQ ID NO: 3256 - RNA, 17 nt, Mus musculus
ggcugacucucagaccc

SEQ ID NO: 3257 - RNA, 17 nt, Mus musculus
cugacucucagaccccu

SEQ ID NO: 3258 - RNA, 17 nt, Mus musculus
ccuggaaucuacagcug

SEQ ID NO: 3259 - RNA, 17 nt, Mus musculus
uggaaucuacagcugcc

SEQ ID NO: 3260 - RNA, 17 nt, Mus musculus
ccgggccuucaauaaaa

SEQ ID NO: 3261 - RNA, 17 nt, Mus musculus
cgggccuucaauaaaau

SEQ ID NO: 3262 - RNA, 17 nt, Mus musculus
ccuucaauaaaauaggg

SEQ ID NO: 3263 - RNA, 17 nt, Mus musculus
aauaaaauagggacugu

SEQ ID NO: 3264 - RNA, 17 nt, Mus musculus
agaaacauaaaauuuua

SEQ ID NO: 3265 - RNA, 17 nt, Mus musculus
cauaaaauuuuauguca

SEQ ID NO: 3266 - RNA, 17 nt, Mus musculus
auaaaauuuuaugucac

SEQ ID NO: 3267 - RNA, 17 nt, Mus musculus
uaaaauuuuaugucaca

SEQ ID NO: 3268 - RNA, 17 nt, Mus musculus
aaaauuuuaugucacag

SEQ ID NO: 3269 - RNA, 17 nt, Mus musculus
uuuuaugucacagaugu

SEQ ID NO: 3270 - RNA, 17 nt, Mus musculus
gaauggcuuucacguuu

SEQ ID NO: 3271 - RNA, 17 nt, Mus musculus
aauggcuuucacguuuc

SEQ ID NO: 3272 - RNA, 17 nt, Mus musculus
auggcuuucacguuucc

SEQ ID NO: 3273 - RNA, 17 nt, Mus musculus
uuucacguuuccuugga

SEQ ID NO: 3274 - RNA, 17 nt, Mus musculus
uucacguuuccuuggaa

SEQ ID NO: 3275 - RNA, 17 nt, Mus musculus
ucacguuuccuuggaaa

SEQ ID NO: 3276 - RNA, 17 nt, Mus musculus
cguuuccuuggaaaaga

SEQ ID NO: 3277 - RNA, 17 nt, Mus musculus
gaaacuguccugugugg

SEQ ID NO: 3278 - RNA, 17 nt, Mus musculus
uguguggucaauaaauu

SEQ ID NO: 3279 - RNA, 17 nt, Mus musculus
uggucaauaaauuccug

SEQ ID NO: 3280 - RNA, 17 nt, Mus musculus
caauaaauuccuguaca

SEQ ID NO: 3281 - RNA, 17 nt, Mus musculus
aauaaauuccuguacag

SEQ ID NO: 3282 - RNA, 17 nt, Mus musculus
auuccuguacagagaca

SEQ ID NO: 3283 - RNA, 17 nt, Mus musculus
agagacauuaccuggau

SEQ ID NO: 3284 - RNA, 17 nt, Mus musculus
gagacauuaccuggauu

SEQ ID NO: 3285 - RNA, 17 nt, Mus musculus
accuggauucugcuacg

SEQ ID NO: 3286 - RNA, 17 nt, Mus musculus
ccuggauucugcuacgg

SEQ ID NO: 3287 - RNA, 17 nt, Mus musculus
auucugcuacggacagu

SEQ ID NO: 3288 - RNA, 17 nt, Mus musculus
cggacaguuaacaacag

SEQ ID NO: 3289 - RNA, 17 nt, Mus musculus
ggacaguuaacaacaga

SEQ ID NO: 3290 - RNA, 17 nt, Mus musculus
ugcaccauaguaucagc

SEQ ID NO: 3291 - RNA, 17 nt, Mus musculus
accauaguaucagcaag

SEQ ID NO: 3292 - RNA, 17 nt, Mus musculus
cauaguaucagcaagca

SEQ ID NO: 3293 - RNA, 17 nt, Mus musculus
ccaccacucaagauuac

SEQ ID NO: 3294 - RNA, 17 nt, Mus musculus
cucaagauuacuccauc

SEQ ID NO: 3295 - RNA, 17 nt, Mus musculus
ucaagauuacuccauca

SEQ ID NO: 3296 - RNA, 17 nt, Mus musculus
agauuacuccaucacuc

SEQ ID NO: 3297 - RNA, 17 nt, Mus musculus
uacuccaucacucugaa

SEQ ID NO: 3298 - RNA, 17 nt, Mus musculus
ccaucacucugaaccuu

SEQ ID NO: 3299 - RNA, 17 nt, Mus musculus
cugaaccuugucaucaa

SEQ ID NO: 3300 - RNA, 17 nt, Mus musculus
aaccuugucaucaagaa

SEQ ID NO: 3301 - RNA, 17 nt, Mus musculus
cuugucaucaagaacgu

SEQ ID NO: 3302 - RNA, 17 nt, Mus musculus
gaacgugucucuagaag

SEQ ID NO: 3303 - RNA, 17 nt, Mus musculus
acgugucucuagaagac

SEQ ID NO: 3304 - RNA, 17 nt, Mus musculus
gugucucuagaagacuc

SEQ ID NO: 3305 - RNA, 17 nt, Mus musculus
agaagacucgggcaccu

SEQ ID NO: 3306 - RNA, 17 nt, Mus musculus
gggcaccuaugcgugca

SEQ ID NO: 3307 - RNA, 17 nt, Mus musculus
aggaacauauacacagg

SEQ ID NO: 3308 - RNA, 17 nt, Mus musculus
gaacauauacacagggg

SEQ ID NO: 3309 - RNA, 17 nt, Mus musculus
gaagacauccuucggaa

SEQ ID NO: 3310 - RNA, 17 nt, Mus musculus
gacauccuucggaagac

SEQ ID NO: 3311 - RNA, 17 nt, Mus musculus
acauccuucggaagaca

SEQ ID NO: 3312 - RNA, 17 nt, Mus musculus
acagaaguucucguuag

SEQ ID NO: 3313 - RNA, 17 nt, Mus musculus
cagaaguucucguuaga

SEQ ID NO: 3314 - RNA, 17 nt, Mus musculus
gaaguucucguuagaga

SEQ ID NO: 3315 - RNA, 17 nt, Mus musculus
guucucguuagagauuc

SEQ ID NO: 3316 - RNA, 17 nt, Mus musculus
uucucguuagagauucg

SEQ ID NO: 3317 - RNA, 17 nt, Mus musculus
uuagagauucggaagcg

SEQ ID NO: 3318 - RNA, 17 nt, Mus musculus
uagagauucggaagcgc

SEQ ID NO: 3319 - RNA, 17 nt, Mus musculus
caccugcuucaaaaccu

SEQ ID NO: 3320 - RNA, 17 nt, Mus musculus
accugcuucaaaaccuc

SEQ ID NO: 3321 - RNA, 17 nt, Mus musculus
caaaaccucagugacua

SEQ ID NO: 3322 - RNA, 17 nt, Mus musculus
cagugacuacgaggucu

SEQ ID NO: 3323 - RNA, 17 nt, Mus musculus
uacgaggucuccaucag

SEQ ID NO: 3324 - RNA, 17 nt, Mus musculus
cgaggucuccaucagug

SEQ ID NO: 3325 - RNA, 17 nt, Mus musculus
gucuccaucaguggcuc

SEQ ID NO: 3326 - RNA, 17 nt, Mus musculus
caguggcucuacgaccu

SEQ ID NO: 3327 - RNA, 17 nt, Mus musculus
guggcucuacgaccuua

SEQ ID NO: 3328 - RNA, 17 nt, Mus musculus
uacgaccuuagacuguc

SEQ ID NO: 3329 - RNA, 17 nt, Mus musculus
acgaccuuagacuguca

SEQ ID NO: 3330 - RNA, 17 nt, Mus musculus
uagacugucaagcuaga

SEQ ID NO: 3331 - RNA, 17 nt, Mus musculus
gucaagcuagagguguc

SEQ ID NO: 3332 - RNA, 17 nt, Mus musculus
agagguguccccgcgcc

SEQ ID NO: 3333 - RNA, 17 nt, Mus musculus
ccgcgccucagaucacu

SEQ ID NO: 3334 - RNA, 17 nt, Mus musculus
agaucacuugguucaaa

SEQ ID NO: 3335 - RNA, 17 nt, Mus musculus
cacuugguucaaaaaca

SEQ ID NO: 3336 - RNA, 17 nt, Mus musculus
acuugguucaaaaacaa

SEQ ID NO: 3337 - RNA, 17 nt, Mus musculus
ccgggaauuauuuuagg

SEQ ID NO: 3338 - RNA, 17 nt, Mus musculus
cgggaauuauuuuagga

SEQ ID NO: 3339 - RNA, 17 nt, Mus musculus
gaaagagucacagagga

SEQ ID NO: 3340 - RNA, 17 nt, Mus musculus
gagggugucuauaggug

SEQ ID NO: 3341 - RNA, 17 nt, Mus musculus
gggugucuauaggugcc

SEQ ID NO: 3342 - RNA, 17 nt, Mus musculus
gugucuauaggugccga

SEQ ID NO: 3343 - RNA, 17 nt, Mus musculus
cgcagccuaccucaccg

SEQ ID NO: 3344 - RNA, 17 nt, Mus musculus
gccuaccucaccgugca

SEQ ID NO: 3345 - RNA, 17 nt, Mus musculus
aggaaccucagacaagu

SEQ ID NO: 3346 - RNA, 17 nt, Mus musculus
agacaagucaaaccugg

SEQ ID NO: 3347 - RNA, 17 nt, Mus musculus
gagcugaucacgcucac

SEQ ID NO: 3348 - RNA, 17 nt, Mus musculus
aucacgcucacgugcac

SEQ ID NO: 3349 - RNA, 17 nt, Mus musculus
gcgacccucuuuuggcu

SEQ ID NO: 3350 - RNA, 17 nt, Mus musculus
gacccucuuuuggcucc

SEQ ID NO: 3351 - RNA, 17 nt, Mus musculus
acccucuuuuggcuccu

SEQ ID NO: 3352 - RNA, 17 nt, Mus musculus
cccucuuuuggcuccuu

SEQ ID NO: 3353 - RNA, 17 nt, Mus musculus
uuuuggcuccuucuaac

SEQ ID NO: 3354 - RNA, 17 nt, Mus musculus
uggcuccuucuaacucu

SEQ ID NO: 3355 - RNA, 17 nt, Mus musculus
ggcuccuucuaacucuc

SEQ ID NO: 3356 - RNA, 17 nt, Mus musculus
cuccuucuaacucucuu

SEQ ID NO: 3357 - RNA, 17 nt, Mus musculus
uucuaacucucuucauc

SEQ ID NO: 3358 - RNA, 17 nt, Mus musculus
cuaacucucuucaucag

SEQ ID NO: 3359 - RNA, 17 nt, Mus musculus
aacucucuucaucagaa

SEQ ID NO: 3360 - RNA, 17 nt, Mus musculus
acucucuucaucagaaa

SEQ ID NO: 3361 - RNA, 17 nt, Mus musculus
cucuucaucagaaaacu

SEQ ID NO: 3362 - RNA, 17 nt, Mus musculus
gaagcggucuucuuccg

SEQ ID NO: 3363 - RNA, 17 nt, Mus musculus
agcggucuucuuccgaa

SEQ ID NO: 3364 - RNA, 17 nt, Mus musculus
gcggucuucuuccgaag

SEQ ID NO: 3365 - RNA, 17 nt, Mus musculus
ggucuucuuccgaagua

SEQ ID NO: 3366 - RNA, 17 nt, Mus musculus
gucuucuuccgaaguaa

SEQ ID NO: 3367 - RNA, 17 nt, Mus musculus
uccgaaguaaagacaga

SEQ ID NO: 3368 - RNA, 17 nt, Mus musculus
gacagacuaccugucaa

SEQ ID NO: 3369 - RNA, 17 nt, Mus musculus
cuaccugucaaucauua

SEQ ID NO: 3370 - RNA, 17 nt, Mus musculus
cugucaaucauuaugga

SEQ ID NO: 3371 - RNA, 17 nt, Mus musculus
ucaaucauuauggaccc

SEQ ID NO: 3372 - RNA, 17 nt, Mus musculus
caaucauuauggaccca

SEQ ID NO: 3373 - RNA, 17 nt, Mus musculus
gaugaaguuccccugga

SEQ ID NO: 3374 - RNA, 17 nt, Mus musculus
augaaguuccccuggau

SEQ ID NO: 3375 - RNA, 17 nt, Mus musculus
gcugcccuaugaugcca

SEQ ID NO: 3376 - RNA, 17 nt, Mus musculus
gugggaguuugcacggg

SEQ ID NO: 3377 - RNA, 17 nt, Mus musculus
ugggaguuugcacggga

SEQ ID NO: 3378 - RNA, 17 nt, Mus musculus
cugaaacuaggcaaauc

SEQ ID NO: 3379 - RNA, 17 nt, Mus musculus
aggcaaaucgcucggaa

SEQ ID NO: 3380 - RNA, 17 nt, Mus musculus
aaaucgcucggaagagg

SEQ ID NO: 3381 - RNA, 17 nt, Mus musculus
gaggggcuuuugggaaa

SEQ ID NO: 3382 - RNA, 17 nt, Mus musculus
aggggcuuuugggaaag

SEQ ID NO: 3383 - RNA, 17 nt, Mus musculus
ggggcuuuugggaaagu

SEQ ID NO: 3384 - RNA, 17 nt, Mus musculus
gggaaagucguucaagc

SEQ ID NO: 3385 - RNA, 17 nt, Mus musculus
aaagucguucaagccuc

SEQ ID NO: 3386 - RNA, 17 nt, Mus musculus
aagucguucaagccucu

SEQ ID NO: 3387 - RNA, 17 nt, Mus musculus
ucaagccucugcauuug

SEQ ID NO: 3388 - RNA, 17 nt, Mus musculus
cucugcauuuggcauua

SEQ ID NO: 3389 - RNA, 17 nt, Mus musculus
ucugcauuuggcauuaa

SEQ ID NO: 3390 - RNA, 17 nt, Mus musculus
uaagaaaucacccaccu

SEQ ID NO: 3391 - RNA, 17 nt, Mus musculus
gaagauguugaaagagg

SEQ ID NO: 3392 - RNA, 17 nt, Mus musculus
cagugaguacaaagcuc

SEQ ID NO: 3393 - RNA, 17 nt, Mus musculus
acaaagcucugaugacc

SEQ ID NO: 3394 - RNA, 17 nt, Mus musculus
accgaacucaagaucuu

SEQ ID NO: 3395 - RNA, 17 nt, Mus musculus
cucaagaucuugaccca

SEQ ID NO: 3396 - RNA, 17 nt, Mus musculus
caagaucuugacccaca

SEQ ID NO: 3397 - RNA, 17 nt, Mus musculus
acccacaucggccauca

SEQ ID NO: 3398 - RNA, 17 nt, Mus musculus
ucggccaucaucugaau

SEQ ID NO: 3399 - RNA, 17 nt, Mus musculus
gccaucaucugaaugug

SEQ ID NO: 3400 - RNA, 17 nt, Mus musculus
aaugugguuaaccuccu

SEQ ID NO: 3401 - RNA, 17 nt, Mus musculus
augugguuaaccuccug

SEQ ID NO: 3402 - RNA, 17 nt, Mus musculus
guuaaccuccugggagc

SEQ ID NO: 3403 - RNA, 17 nt, Mus musculus
auggugaucguggaaua

SEQ ID NO: 3404 - RNA, 17 nt, Mus musculus
cguggaauacugcaaau

SEQ ID NO: 3405 - RNA, 17 nt, Mus musculus
cugcaaauacggaaacc

SEQ ID NO: 3406 - RNA, 17 nt, Mus musculus
aaaccuguccaacuacc

SEQ ID NO: 3407 - RNA, 17 nt, Mus musculus
guccaacuaccucaaga

SEQ ID NO: 3408 - RNA, 17 nt, Mus musculus
acgugacuuauucuguc

SEQ ID NO: 3409 - RNA, 17 nt, Mus musculus
cgugacuuauucugucu

SEQ ID NO: 3410 - RNA, 17 nt, Mus musculus
ugacuuauucugucuca

SEQ ID NO: 3411 - RNA, 17 nt, Mus musculus
gacuuauucugucucaa

SEQ ID NO: 3412 - RNA, 17 nt, Mus musculus
uauucugucucaacaag

SEQ ID NO: 3413 - RNA, 17 nt, Mus musculus
uucugucucaacaagga

SEQ ID NO: 3414 - RNA, 17 nt, Mus musculus
cgcagccuugcauaugg

SEQ ID NO: 3415 - RNA, 17 nt, Mus musculus
ccuugcauauggagcuc

SEQ ID NO: 3416 - RNA, 17 nt, Mus musculus
auggagcucaagaaaga

SEQ ID NO: 3417 - RNA, 17 nt, Mus musculus
ccccgccuagacagugu

SEQ ID NO: 3418 - RNA, 17 nt, Mus musculus
gacagugucagcagcuc

SEQ ID NO: 3419 - RNA, 17 nt, Mus musculus
cagcagcucaaguguca

SEQ ID NO: 3420 - RNA, 17 nt, Mus musculus
ucaagugucaccagcuc

SEQ ID NO: 3421 - RNA, 17 nt, Mus musculus
caccagcuccagcuucc

SEQ ID NO: 3422 - RNA, 17 nt, Mus musculus
cuccagcuucccugaag

SEQ ID NO: 3423 - RNA, 17 nt, Mus musculus
uccagcuucccugaaga

SEQ ID NO: 3424 - RNA, 17 nt, Mus musculus
acgaggauuacagugag

SEQ ID NO: 3425 - RNA, 17 nt, Mus musculus
cgaggauuacagugaga

SEQ ID NO: 3426 - RNA, 17 nt, Mus musculus
agugagaucuccaagca

SEQ ID NO: 3427 - RNA, 17 nt, Mus musculus
ugagaucuccaagcagc

SEQ ID NO: 3428 - RNA, 17 nt, Mus musculus
cagccccucaccaugga

SEQ ID NO: 3429 - RNA, 17 nt, Mus musculus
gaccugauuuccuacag

SEQ ID NO: 3430 - RNA, 17 nt, Mus musculus
accugauuuccuacagu

SEQ ID NO: 3431 - RNA, 17 nt, Mus musculus
ccugauuuccuacaguu

SEQ ID NO: 3432 - RNA, 17 nt, Mus musculus
gauuuccuacaguuucc

SEQ ID NO: 3433 - RNA, 17 nt, Mus musculus
ccuacaguuuccaagug

SEQ ID NO: 3434 - RNA, 17 nt, Mus musculus
cuacaguuuccaagugg

SEQ ID NO: 3435 - RNA, 17 nt, Mus musculus
uacaguuuccaaguggc

SEQ ID NO: 3436 - RNA, 17 nt, Mus musculus
cauggaguuucuguccu

SEQ ID NO: 3437 - RNA, 17 nt, Mus musculus
auggaguuucuguccuc

SEQ ID NO: 3438 - RNA, 17 nt, Mus musculus
uggaguuucuguccucc

SEQ ID NO: 3439 - RNA, 17 nt, Mus musculus
guuucuguccuccagaa

SEQ ID NO: 3440 - RNA, 17 nt, Mus musculus
ucuguccuccagaaagu

SEQ ID NO: 3441 - RNA, 17 nt, Mus musculus
agaaacauccuuuuauc

SEQ ID NO: 3442 - RNA, 17 nt, Mus musculus
aacauccuuuuaucuga

SEQ ID NO: 3443 - RNA, 17 nt, Mus musculus
acauccuuuuaucugag

SEQ ID NO: 3444 - RNA, 17 nt, Mus musculus
cauccuuuuaucugaga

SEQ ID NO: 3445 - RNA, 17 nt, Mus musculus
auccuuuuaucugagaa

SEQ ID NO: 3446 - RNA, 17 nt, Mus musculus
ccuuuuaucugagaaca

SEQ ID NO: 3447 - RNA, 17 nt, Mus musculus
gugaagauuugcgacuu

SEQ ID NO: 3448 - RNA, 17 nt, Mus musculus
ugaagauuugcgacuuu

SEQ ID NO: 3449 - RNA, 17 nt, Mus musculus
uugcgacuuuggccugg

SEQ ID NO: 3450 - RNA, 17 nt, Mus musculus
ugcgacuuuggccuggc

SEQ ID NO: 3451 - RNA, 17 nt, Mus musculus
auauuuauaagaacccu

SEQ ID NO: 3452 - RNA, 17 nt, Mus musculus
acccugauuaugugagg

SEQ ID NO: 3453 - RNA, 17 nt, Mus musculus
cccugauuaugugagga

SEQ ID NO: 3454 - RNA, 17 nt, Mus musculus
gaggagauacucgacuu

SEQ ID NO: 3455 - RNA, 17 nt, Mus musculus
gagauacucgacuuccc

SEQ ID NO: 3456 - RNA, 17 nt, Mus musculus
acucgacuuccccuaaa

SEQ ID NO: 3457 - RNA, 17 nt, Mus musculus
cucgacuuccccuaaaa

SEQ ID NO: 3458 - RNA, 17 nt, Mus musculus
cuuccccuaaaauggau

SEQ ID NO: 3459 - RNA, 17 nt, Mus musculus
ggauggcuccugaaucc

SEQ ID NO: 3460 - RNA, 17 nt, Mus musculus
uccugaauccaucuuug

SEQ ID NO: 3461 - RNA, 17 nt, Mus musculus
gaauccaucuuugacaa

SEQ ID NO: 3462 - RNA, 17 nt, Mus musculus
auccaucuuugacaagg

SEQ ID NO: 3463 - RNA, 17 nt, Mus musculus
uccaucuuugacaaggu

SEQ ID NO: 3464 - RNA, 17 nt, Mus musculus
gacaaggucuacagcac

SEQ ID NO: 3465 - RNA, 17 nt, Mus musculus
caaggucuacagcacca

SEQ ID NO: 3466 - RNA, 17 nt, Mus musculus
ugugugguccuauggcg

SEQ ID NO: 3467 - RNA, 17 nt, Mus musculus
gugguccuauggcgugu

SEQ ID NO: 3468 - RNA, 17 nt, Mus musculus
uggcguguugcuguggg

SEQ ID NO: 3469 - RNA, 17 nt, Mus musculus
ugggagaucuucuccuu

SEQ ID NO: 3470 - RNA, 17 nt, Mus musculus
ggagaucuucuccuuag

SEQ ID NO: 3471 - RNA, 17 nt, Mus musculus
gagaucuucuccuuagg

SEQ ID NO: 3472 - RNA, 17 nt, Mus musculus
gaucuucuccuuagggg

SEQ ID NO: 3473 - RNA, 17 nt, Mus musculus
cuucuccuuaggggguu

SEQ ID NO: 3474 - RNA, 17 nt, Mus musculus
uucuccuuaggggguuc

SEQ ID NO: 3475 - RNA, 17 nt, Mus musculus
uaggggguucuccauac

SEQ ID NO: 3476 - RNA, 17 nt, Mus musculus
aggggguucuccauacc

SEQ ID NO: 3477 - RNA, 17 nt, Mus musculus
gggguucuccauaccca

SEQ ID NO: 3478 - RNA, 17 nt, Mus musculus
uucuccauacccaggag

SEQ ID NO: 3479 - RNA, 17 nt, Mus musculus
ugaagacuucugcagcc

SEQ ID NO: 3480 - RNA, 17 nt, Mus musculus
gaagacuucugcagccg

SEQ ID NO: 3481 - RNA, 17 nt, Mus musculus
cccggaguaugccacac

SEQ ID NO: 3482 - RNA, 17 nt, Mus musculus
ccugaaaucuaccaaau

SEQ ID NO: 3483 - RNA, 17 nt, Mus musculus
ugaaaucuaccaaauca

SEQ ID NO: 3484 - RNA, 17 nt, Mus musculus
uaccaaaucauguugga

SEQ ID NO: 3485 - RNA, 17 nt, Mus musculus
aaucauguuggauugcu

SEQ ID NO: 3486 - RNA, 17 nt, Mus musculus
uguuggauugcuggcac

SEQ ID NO: 3487 - RNA, 17 nt, Mus musculus
gccccgguuugcugaac

SEQ ID NO: 3488 - RNA, 17 nt, Mus musculus
ccccgguuugcugaacu

SEQ ID NO: 3489 - RNA, 17 nt, Mus musculus
gcugaacuuguggagaa

SEQ ID NO: 3490 - RNA, 17 nt, Mus musculus
gagaaacuuggugaccu

SEQ ID NO: 3491 - RNA, 17 nt, Mus musculus
gaccugcuucaagccaa

SEQ ID NO: 3492 - RNA, 17 nt, Mus musculus
accugcuucaagccaac

SEQ ID NO: 3493 - RNA, 17 nt, Mus musculus
gccaacguccaacagga

SEQ ID NO: 3494 - RNA, 17 nt, Mus musculus
ggaaagauuacaucccc

SEQ ID NO: 3495 - RNA, 17 nt, Mus musculus
gaaagauuacauccccc

SEQ ID NO: 3496 - RNA, 17 nt, Mus musculus
gauuacaucccccucaa

SEQ ID NO: 3497 - RNA, 17 nt, Mus musculus
aucccccucaaugccau

SEQ ID NO: 3498 - RNA, 17 nt, Mus musculus
aaugccauacugacuag

SEQ ID NO: 3499 - RNA, 17 nt, Mus musculus
uacugacuagaaacagu

SEQ ID NO: 3500 - RNA, 17 nt, Mus musculus
gaaacaguagcuucaca

SEQ ID NO: 3501 - RNA, 17 nt, Mus musculus
caguagcuucacauacu

SEQ ID NO: 3502 - RNA, 17 nt, Mus musculus
aguagcuucacauacuc

SEQ ID NO: 3503 - RNA, 17 nt, Mus musculus
cuucacauacucgaccc

SEQ ID NO: 3504 - RNA, 17 nt, Mus musculus
cacauacucgaccccca

SEQ ID NO: 3505 - RNA, 17 nt, Mus musculus
ccccaccuucucugagg

SEQ ID NO: 3506 - RNA, 17 nt, Mus musculus
cccaccuucucugagga

SEQ ID NO: 3507 - RNA, 17 nt, Mus musculus
caccuucucugaggacc

SEQ ID NO: 3508 - RNA, 17 nt, Mus musculus
gaggaccuuuucaagga

SEQ ID NO: 3509 - RNA, 17 nt, Mus musculus
aggaccuuuucaaggac

SEQ ID NO: 3510 - RNA, 17 nt, Mus musculus
ggaccuuuucaaggacg

SEQ ID NO: 3511 - RNA, 17 nt, Mus musculus
gaccuuuucaaggacgg

SEQ ID NO: 3512 - RNA, 17 nt, Mus musculus
ggacggcuuugcagauc

SEQ ID NO: 3513 - RNA, 17 nt, Mus musculus
gacggcuuugcagaucc

SEQ ID NO: 3514 - RNA, 17 nt, Mus musculus
uugcagauccacauuuu

SEQ ID NO: 3515 - RNA, 17 nt, Mus musculus
auccacauuuucauucc

SEQ ID NO: 3516 - RNA, 17 nt, Mus musculus
uccacauuuucauuccg

SEQ ID NO: 3517 - RNA, 17 nt, Mus musculus
ccacauuuucauuccgg

SEQ ID NO: 3518 - RNA, 17 nt, Mus musculus
cacauuuucauuccgga

SEQ ID NO: 3519 - RNA, 17 nt, Mus musculus
auuuucauuccggaagc

SEQ ID NO: 3520 - RNA, 17 nt, Mus musculus
uuuucauuccggaagcu

SEQ ID NO: 3521 - RNA, 17 nt, Mus musculus
cggaagcucugaugaug

SEQ ID NO: 3522 - RNA, 17 nt, Mus musculus
ugugagauauguaaacg

SEQ ID NO: 3523 - RNA, 17 nt, Mus musculus
agauauguaaacgcuuu

SEQ ID NO: 3524 - RNA, 17 nt, Mus musculus
uaaacgcuuucaaauuc

SEQ ID NO: 3525 - RNA, 17 nt, Mus musculus
aaacgcuuucaaauuca

SEQ ID NO: 3526 - RNA, 17 nt, Mus musculus
aacgcuuucaaauucau

SEQ ID NO: 3527 - RNA, 17 nt, Mus musculus
uuucaaauucaugagcc

SEQ ID NO: 3528 - RNA, 17 nt, Mus musculus
uucaaauucaugagccu

SEQ ID NO: 3529 - RNA, 17 nt, Mus musculus
caaaaccuuugaggagc

SEQ ID NO: 3530 - RNA, 17 nt, Mus musculus
aaaaccuuugaggagcu

SEQ ID NO: 3531 - RNA, 17 nt, Mus musculus
gaggagcuuucaccgaa

SEQ ID NO: 3532 - RNA, 17 nt, Mus musculus
aggagcuuucaccgaac

SEQ ID NO: 3533 - RNA, 17 nt, Mus musculus
ggagcuuucaccgaacu

SEQ ID NO: 3534 - RNA, 17 nt, Mus musculus
accgaacuccaccucca

SEQ ID NO: 3535 - RNA, 17 nt, Mus musculus
cuccaccuccauguuug

SEQ ID NO: 3536 - RNA, 17 nt, Mus musculus
cuccauguuugaggacu

SEQ ID NO: 3537 - RNA, 17 nt, Mus musculus
uccauguuugaggacua

SEQ ID NO: 3538 - RNA, 17 nt, Mus musculus
ugaggacuaucagcugg

SEQ ID NO: 3539 - RNA, 17 nt, Mus musculus
aggacuaucagcuggac

SEQ ID NO: 3540 - RNA, 17 nt, Mus musculus
uggacacuagcacucug

SEQ ID NO: 3541 - RNA, 17 nt, Mus musculus
cuagcacucugcugggc

SEQ ID NO: 3542 - RNA, 17 nt, Mus musculus
gcugggcucccccuugc

SEQ ID NO: 3543 - RNA, 17 nt, Mus musculus
cucccccuugcugaagc

SEQ ID NO: 3544 - RNA, 17 nt, Mus musculus
gaagcgguucaccugga

SEQ ID NO: 3545 - RNA, 17 nt, Mus musculus
aagcgguucaccuggac

SEQ ID NO: 3546 - RNA, 17 nt, Mus musculus
caaggccuccaugaaga

SEQ ID NO: 3547 - RNA, 17 nt, Mus musculus
augaagauagacuugag

SEQ ID NO: 3548 - RNA, 17 nt, Mus musculus
gauagacuugagaauag

SEQ ID NO: 3549 - RNA, 17 nt, Mus musculus
uugagaauagcgaguaa

SEQ ID NO: 3550 - RNA, 17 nt, Mus musculus
uagcgaguaaaagcaag

SEQ ID NO: 3551 - RNA, 17 nt, Mus musculus
gcgggacuuuccgaucu

SEQ ID NO: 3552 - RNA, 17 nt, Mus musculus
cgggacuuuccgaucug

SEQ ID NO: 3553 - RNA, 17 nt, Mus musculus
gggacuuuccgaucugc

SEQ ID NO: 3554 - RNA, 17 nt, Mus musculus
uuuccgaucugccgagg

SEQ ID NO: 3555 - RNA, 17 nt, Mus musculus
gcccagcuucugcuucu

SEQ ID NO: 3556 - RNA, 17 nt, Mus musculus
cccagcuucugcuucuc

SEQ ID NO: 3557 - RNA, 17 nt, Mus musculus
cuucugcuucuccagcu

SEQ ID NO: 3558 - RNA, 17 nt, Mus musculus
uucugcuucuccagcug

SEQ ID NO: 3559 - RNA, 17 nt, Mus musculus
cugcuucuccagcugug

SEQ ID NO: 3560 - RNA, 17 nt, Mus musculus
ggccacaucaggcccgu

SEQ ID NO: 3561 - RNA, 17 nt, Mus musculus
cgaugaaucugagcugg

SEQ ID NO: 3562 - RNA, 17 nt, Mus musculus
aaaggaguccugcuguu

SEQ ID NO: 3563 - RNA, 17 nt, Mus musculus
ccugcuguucuccaccc

SEQ ID NO: 3564 - RNA, 17 nt, Mus musculus
cugcuguucuccacccc

SEQ ID NO: 3565 - RNA, 17 nt, Mus musculus
gcuguucuccaccccca

SEQ ID NO: 3566 - RNA, 17 nt, Mus musculus
cccagacuacaacuccg

SEQ ID NO: 3567 - RNA, 17 nt, Mus musculus
cuacaacuccguggugu

SEQ ID NO: 3568 - RNA, 17 nt, Mus musculus
cgugguguuguacuccu

SEQ ID NO: 3569 - RNA, 17 nt, Mus musculus
gguguuguacuccuccc

SEQ ID NO: 3570 - RNA, 17 nt, Mus musculus
guuguacuccuccccgc

SEQ ID NO: 3571 - RNA, 17 nt, Mus musculus
guacuccuccccgcccg

SEQ ID NO: 3572 - RNA, 17 nt, Mus musculus
gcccgccuaaagcuucu

SEQ ID NO: 3573 - RNA, 17 nt, Mus musculus
cuaaagcuucucaccag

SEQ ID NO: 3574 - RNA, 17 nt, Mus musculus
uaaagcuucucaccagc

SEQ ID NO: 3575 - RNA, 17 nt, Mus musculus
aagcuucucaccagccc

SEQ ID NO: 3576 - RNA, 17 nt, Mus musculus
cugacaguauuauacau

SEQ ID NO: 3577 - RNA, 17 nt, Mus musculus
gacaguauuauacaucu

SEQ ID NO: 3578 - RNA, 17 nt, Mus musculus
acaguauuauacaucua

SEQ ID NO: 3579 - RNA, 17 nt, Mus musculus
aguauuauacaucuaug

SEQ ID NO: 3580 - RNA, 17 nt, Mus musculus
uuauacaucuaugaguu

SEQ ID NO: 3581 - RNA, 17 nt, Mus musculus
auacaucuaugaguuua

SEQ ID NO: 3582 - RNA, 17 nt, Mus musculus
cuaugaguuuacaccua

SEQ ID NO: 3583 - RNA, 17 nt, Mus musculus
uaugaguuuacaccuau

SEQ ID NO: 3584 - RNA, 17 nt, Mus musculus
augaguuuacaccuauu

SEQ ID NO: 3585 - RNA, 17 nt, Mus musculus
uuacaccuauuccgcuc

SEQ ID NO: 3586 - RNA, 17 nt, Mus musculus
acaccuauuccgcucca

SEQ ID NO: 3587 - RNA, 17 nt, Mus musculus
caccuauuccgcuccac

SEQ ID NO: 3588 - RNA, 17 nt, Mus musculus
auuccgcuccacaggag

SEQ ID NO: 3589 - RNA, 17 nt, Mus musculus
cagcugcuuuucgugac

SEQ ID NO: 3590 - RNA, 17 nt, Mus musculus
agcugcuuuucgugacc

SEQ ID NO: 3591 - RNA, 17 nt, Mus musculus
gcugcuuuucgugaccu

SEQ ID NO: 3592 - RNA, 17 nt, Mus musculus
cugcuuuucgugaccuu

SEQ ID NO: 3593 - RNA, 17 nt, Mus musculus
cgugaccuuuaaucgug

SEQ ID NO: 3594 - RNA, 17 nt, Mus musculus
gugaccuuuaaucgugc

SEQ ID NO: 3595 - RNA, 17 nt, Mus musculus
ugaccuuuaaucgugcu

SEQ ID NO: 3596 - RNA, 17 nt, Mus musculus
ccuuuaaucgugcuuuu

SEQ ID NO: 3597 - RNA, 17 nt, Mus musculus
aucgugcuuuuuuguuu

SEQ ID NO: 3598 - RNA, 17 nt, Mus musculus
ucgugcuuuuuuguuuu

SEQ ID NO: 3599 - RNA, 17 nt, Mus musculus
cgugcuuuuuuguuuuu

SEQ ID NO: 3600 - RNA, 17 nt, Mus musculus
gugcuuuuuuguuuuuu

SEQ ID NO: 3601 - RNA, 17 nt, Mus musculus
ugcuuuuuuguuuuuug

SEQ ID NO: 3602 - RNA, 17 nt, Mus musculus
uuuuuuguuuuuuguuu

SEQ ID NO: 3603 - RNA, 17 nt, Mus musculus
uuuuuguuuuuuguuuu

SEQ ID NO: 3604 - RNA, 17 nt, Mus musculus
uuuuguuuuuuguuuug

SEQ ID NO: 3605 - RNA, 17 nt, Mus musculus
uuuguuuuuuguuuugu

SEQ ID NO: 3606 - RNA, 17 nt, Mus musculus
uuguuuuuuguuuuguu

SEQ ID NO: 3607 - RNA, 17 nt, Mus musculus
uuuuuuguuuuguuugu

SEQ ID NO: 3608 - RNA, 17 nt, Mus musculus
uuuuuguuuuguuuguu

SEQ ID NO: 3609 - RNA, 17 nt, Mus musculus
uuuuguuuuguuuguug

SEQ ID NO: 3610 - RNA, 17 nt, Mus musculus
uguuuuguuuguuguug

SEQ ID NO: 3611 - RNA, 17 nt, Mus musculus
guuuuguuuguuguugc

SEQ ID NO: 3612 - RNA, 17 nt, Mus musculus
uuguuuguuguugcugu

SEQ ID NO: 3613 - RNA, 17 nt, Mus musculus
uuuguuguugcuguuuu

SEQ ID NO: 3614 - RNA, 17 nt, Mus musculus
guugcuguuuugacuaa

SEQ ID NO: 3615 - RNA, 17 nt, Mus musculus
uugcuguuuugacuaac

SEQ ID NO: 3616 - RNA, 17 nt, Mus musculus
ugcuguuuugacuaaca

SEQ ID NO: 3617 - RNA, 17 nt, Mus musculus
aagaauguaaccccagu

SEQ ID NO: 3618 - RNA, 17 nt, Mus musculus
accccaguuagugacgu

SEQ ID NO: 3619 - RNA, 17 nt, Mus musculus
ccccaguuagugacgug

SEQ ID NO: 3620 - RNA, 17 nt, Mus musculus
ugaagaauacuauuguu

SEQ ID NO: 3621 - RNA, 17 nt, Mus musculus
agaauacuauuguuaga

SEQ ID NO: 3622 - RNA, 17 nt, Mus musculus
aauacuauuguuagaga

SEQ ID NO: 3623 - RNA, 17 nt, Mus musculus
acuauuguuagagaaau

SEQ ID NO: 3624 - RNA, 17 nt, Mus musculus
cuauuguuagagaaauc

SEQ ID NO: 3625 - RNA, 17 nt, Mus musculus
agagaaaucccccccgc

SEQ ID NO: 3626 - RNA, 17 nt, Mus musculus
caaagccucaggguaac

SEQ ID NO: 3627 - RNA, 17 nt, Mus musculus
cucaggguaaccuggac

SEQ ID NO: 3628 - RNA, 17 nt, Mus musculus
aggugccucuggcgacc

SEQ ID NO: 3629 - RNA, 17 nt, Mus musculus
cccacccucccugcagc

SEQ ID NO: 3630 - RNA, 17 nt, Mus musculus
gugggacuagaggcagu

SEQ ID NO: 3631 - RNA, 17 nt, Mus musculus
gaggcaguaagcccauu

SEQ ID NO: 3632 - RNA, 17 nt, Mus musculus
aagcccauuagcucaug

SEQ ID NO: 3633 - RNA, 17 nt, Mus musculus
agcccauuagcucaugg

SEQ ID NO: 3634 - RNA, 17 nt, Mus musculus
cauuagcucauggcugc

SEQ ID NO: 3635 - RNA, 17 nt, Mus musculus
gaccugcucugucucuc

SEQ ID NO: 3636 - RNA, 17 nt, Mus musculus
ugcucugucucucuuau

SEQ ID NO: 3637 - RNA, 17 nt, Mus musculus
cucugucucucuuaugg

SEQ ID NO: 3638 - RNA, 17 nt, Mus musculus
cugucucucuuauggag

SEQ ID NO: 3639 - RNA, 17 nt, Mus musculus
gucucucuuauggagga

SEQ ID NO: 3640 - RNA, 17 nt, Mus musculus
ucucucuuauggaggaa

SEQ ID NO: 3641 - RNA, 17 nt, Mus musculus
aaaaggcuuugggaugc

SEQ ID NO: 3642 - RNA, 17 nt, Mus musculus
aaaggcuuugggaugcg

SEQ ID NO: 3643 - RNA, 17 nt, Mus musculus
ggaugcguccguccugu

SEQ ID NO: 3644 - RNA, 17 nt, Mus musculus
gcguccguccuguggag

SEQ ID NO: 3645 - RNA, 17 nt, Mus musculus
agggggcuccgcuaugc

SEQ ID NO: 3646 - RNA, 17 nt, Mus musculus
gcuccgcuaugccacuu

SEQ ID NO: 3647 - RNA, 17 nt, Mus musculus
augccacuucagugacu

SEQ ID NO: 3648 - RNA, 17 nt, Mus musculus
ugccacuucagugacuu

SEQ ID NO: 3649 - RNA, 17 nt, Mus musculus
cagugacuucucacucc

SEQ ID NO: 3650 - RNA, 17 nt, Mus musculus
agugacuucucacuccu

SEQ ID NO: 3651 - RNA, 17 nt, Mus musculus
ugacuucucacuccugg

SEQ ID NO: 3652 - RNA, 17 nt, Mus musculus
uucucacuccuggccuc

SEQ ID NO: 3653 - RNA, 17 nt, Mus musculus
ccuggccuccgcuguuu

SEQ ID NO: 3654 - RNA, 17 nt, Mus musculus
uccgcuguuucgggccc

SEQ ID NO: 3655 - RNA, 17 nt, Mus musculus
ccgcuguuucgggcccc

SEQ ID NO: 3656 - RNA, 17 nt, Mus musculus
cgcuguuucgggccccc

SEQ ID NO: 3657 - RNA, 17 nt, Mus musculus
ggcccccuuccaagagg

SEQ ID NO: 3658 - RNA, 17 nt, Mus musculus
gcccccuuccaagaggu

SEQ ID NO: 3659 - RNA, 17 nt, Mus musculus
caagagguaucagagca

SEQ ID NO: 3660 - RNA, 17 nt, Mus musculus
agagguaucagagcaga

SEQ ID NO: 3661 - RNA, 17 nt, Mus musculus
agggacguuuccuagac

SEQ ID NO: 3662 - RNA, 17 nt, Mus musculus
gggacguuuccuagacc

SEQ ID NO: 3663 - RNA, 17 nt, Mus musculus
ggacguuuccuagacca

SEQ ID NO: 3664 - RNA, 17 nt, Mus musculus
cguuuccuagaccaggg

SEQ ID NO: 3665 - RNA, 17 nt, Mus musculus
gcacauguucucgggaa

SEQ ID NO: 3666 - RNA, 17 nt, Mus musculus
cacauguucucgggaac

SEQ ID NO: 3667 - RNA, 17 nt, Mus musculus
cauguucucgggaacca

SEQ ID NO: 3668 - RNA, 17 nt, Mus musculus
accacaguuaaucuuaa

SEQ ID NO: 3669 - RNA, 17 nt, Mus musculus
ccacaguuaaucuuaaa

SEQ ID NO: 3670 - RNA, 17 nt, Mus musculus
caguuaaucuuaaaucu

SEQ ID NO: 3671 - RNA, 17 nt, Mus musculus
guuaaucuuaaaucuuu

SEQ ID NO: 3672 - RNA, 17 nt, Mus musculus
uuaaucuuaaaucuuuu

SEQ ID NO: 3673 - RNA, 17 nt, Mus musculus
ucuuaaaucuuuucccg

SEQ ID NO: 3674 - RNA, 17 nt, Mus musculus
uuaaaucuuuucccggg

SEQ ID NO: 3675 - RNA, 17 nt, Mus musculus
uaaaucuuuucccggga

SEQ ID NO: 3676 - RNA, 17 nt, Mus musculus
aaaucuuuucccgggag

SEQ ID NO: 3677 - RNA, 17 nt, Mus musculus
aaucuuuucccgggagu

SEQ ID NO: 3678 - RNA, 17 nt, Mus musculus
ccgggagucuucuguug

SEQ ID NO: 3679 - RNA, 17 nt, Mus musculus
gggagucuucuguuguc

SEQ ID NO: 3680 - RNA, 17 nt, Mus musculus
ggagucuucuguugucu

SEQ ID NO: 3681 - RNA, 17 nt, Mus musculus
ucuucuguugucuguuu

SEQ ID NO: 3682 - RNA, 17 nt, Mus musculus
ucuguugucuguuuacc

SEQ ID NO: 3683 - RNA, 17 nt, Mus musculus
uugucuguuuaccaucc

SEQ ID NO: 3684 - RNA, 17 nt, Mus musculus
ugucuguuuaccaucca

SEQ ID NO: 3685 - RNA, 17 nt, Mus musculus
gucuguuuaccauccaa

SEQ ID NO: 3686 - RNA, 17 nt, Mus musculus
uuuaccauccaaagcau

SEQ ID NO: 3687 - RNA, 17 nt, Mus musculus
caaagcauauuuaacau

SEQ ID NO: 3688 - RNA, 17 nt, Mus musculus
aagcauauuuaacaugu

SEQ ID NO: 3689 - RNA, 17 nt, Mus musculus
agcauauuuaacaugug

SEQ ID NO: 3690 - RNA, 17 nt, Mus musculus
gcauauuuaacaugugu

SEQ ID NO: 3691 - RNA, 17 nt, Mus musculus
acaugugucaguggggg

SEQ ID NO: 3692 - RNA, 17 nt, Mus musculus
guggcgcuuggcuucug

SEQ ID NO: 3693 - RNA, 17 nt, Mus musculus
gcuuggcuucugaggcc

SEQ ID NO: 3694 - RNA, 17 nt, Mus musculus
cuuggcuucugaggcca

SEQ ID NO: 3695 - RNA, 17 nt, Mus musculus
agagccaucaucaguuc

SEQ ID NO: 3696 - RNA, 17 nt, Mus musculus
gccaucaucaguuccuc

SEQ ID NO: 3697 - RNA, 17 nt, Mus musculus
ucaucaguuccucuagu

SEQ ID NO: 3698 - RNA, 17 nt, Mus musculus
caucaguuccucuagug

SEQ ID NO: 3699 - RNA, 17 nt, Mus musculus
caguuccucuagugaga

SEQ ID NO: 3700 - RNA, 17 nt, Mus musculus
guuccucuagugagaug

SEQ ID NO: 3701 - RNA, 17 nt, Mus musculus
agaugcauugaggucau

SEQ ID NO: 3702 - RNA, 17 nt, Mus musculus
auugaggucauacccaa

SEQ ID NO: 3703 - RNA, 17 nt, Mus musculus
gaggucauacccaagcu

SEQ ID NO: 3704 - RNA, 17 nt, Mus musculus
cccaagcuugcaggccu

SEQ ID NO: 3705 - RNA, 17 nt, Mus musculus
ccugaccuucgcauacu

SEQ ID NO: 3706 - RNA, 17 nt, Mus musculus
cugaccuucgcauacug

SEQ ID NO: 3707 - RNA, 17 nt, Mus musculus
cuucgcauacugcucac

SEQ ID NO: 3708 - RNA, 17 nt, Mus musculus
auacugcucacggggag

SEQ ID NO: 3709 - RNA, 17 nt, Mus musculus
cggggaguuaagugguc

SEQ ID NO: 3710 - RNA, 17 nt, Mus musculus
ggggaguuaaguggucc

SEQ ID NO: 3711 - RNA, 17 nt, Mus musculus
uaagugguccaguuugg

SEQ ID NO: 3712 - RNA, 17 nt, Mus musculus
gguccaguuuggccuag

SEQ ID NO: 3713 - RNA, 17 nt, Mus musculus
guccaguuuggccuagu

SEQ ID NO: 3714 - RNA, 17 nt, Mus musculus
uuuggccuaguaagguu

SEQ ID NO: 3715 - RNA, 17 nt, Mus musculus
ggccuaguaagguugcc

SEQ ID NO: 3716 - RNA, 17 nt, Mus musculus
aguaagguugccuacug

SEQ ID NO: 3717 - RNA, 17 nt, Mus musculus
gguugccuacugauggg

SEQ ID NO: 3718 - RNA, 17 nt, Mus musculus
gaugggcucaaaagcca

SEQ ID NO: 3719 - RNA, 17 nt, Mus musculus
agccacauuuuaaacag

SEQ ID NO: 3720 - RNA, 17 nt, Mus musculus
gccacauuuuaaacagg

SEQ ID NO: 3721 - RNA, 17 nt, Mus musculus
ccacauuuuaaacaggu

SEQ ID NO: 3722 - RNA, 17 nt, Mus musculus
cacauuuuaaacagguu

SEQ ID NO: 3723 - RNA, 17 nt, Mus musculus
aaacagguuuuaucuca

SEQ ID NO: 3724 - RNA, 17 nt, Mus musculus
aacagguuuuaucucaa

SEQ ID NO: 3725 - RNA, 17 nt, Mus musculus
acagguuuuaucucaag

SEQ ID NO: 3726 - RNA, 17 nt, Mus musculus
cagguuuuaucucaagu

SEQ ID NO: 3727 - RNA, 17 nt, Mus musculus
gguuuuaucucaaguau

SEQ ID NO: 3728 - RNA, 17 nt, Mus musculus
uuuuaucucaaguauua

SEQ ID NO: 3729 - RNA, 17 nt, Mus musculus
ucucaaguauuaauaua

SEQ ID NO: 3730 - RNA, 17 nt, Mus musculus
ucaaguauuaauauaua

SEQ ID NO: 3731 - RNA, 17 nt, Mus musculus
caaguauuaauauauag

SEQ ID NO: 3732 - RNA, 17 nt, Mus musculus
guauuaauauauagaca

SEQ ID NO: 3733 - RNA, 17 nt, Mus musculus
auuaauauauagacaag

SEQ ID NO: 3734 - RNA, 17 nt, Mus musculus
uaauauauagacaagac

SEQ ID NO: 3735 - RNA, 17 nt, Mus musculus
aagacacuuaugcauua

SEQ ID NO: 3736 - RNA, 17 nt, Mus musculus
agacacuuaugcauuau

SEQ ID NO: 3737 - RNA, 17 nt, Mus musculus
uuaugcauuauccuguu

SEQ ID NO: 3738 - RNA, 17 nt, Mus musculus
uaugcauuauccuguuu

SEQ ID NO: 3739 - RNA, 17 nt, Mus musculus
ugcauuauccuguuuua

SEQ ID NO: 3740 - RNA, 17 nt, Mus musculus
uauccuguuuuauauau

SEQ ID NO: 3741 - RNA, 17 nt, Mus musculus
auccuguuuuauauauc

SEQ ID NO: 3742 - RNA, 17 nt, Mus musculus
uccuguuuuauauaucc

SEQ ID NO: 3743 - RNA, 17 nt, Mus musculus
ccuguuuuauauaucca

SEQ ID NO: 3744 - RNA, 17 nt, Mus musculus
uguuuuauauauccaau

SEQ ID NO: 3745 - RNA, 17 nt, Mus musculus
uuuuauauauccaauga

SEQ ID NO: 3746 - RNA, 17 nt, Mus musculus
uuauauauccaaugaau

SEQ ID NO: 3747 - RNA, 17 nt, Mus musculus
caaugaauauaacuggg

SEQ ID NO: 3748 - RNA, 17 nt, Mus musculus
augaauauaacuggggc

SEQ ID NO: 3749 - RNA, 17 nt, Mus musculus
gggcgaguuaagaguca

SEQ ID NO: 3750 - RNA, 17 nt, Mus musculus
ggcgaguuaagagucau

SEQ ID NO: 3751 - RNA, 17 nt, Mus musculus
uuaagagucauggucua

SEQ ID NO: 3752 - RNA, 17 nt, Mus musculus
gucauggucuagaaaag

SEQ ID NO: 3753 - RNA, 17 nt, Mus musculus
cauggucuagaaaaggg

SEQ ID NO: 3754 - RNA, 17 nt, Mus musculus
aaagggguuucucugua

SEQ ID NO: 3755 - RNA, 17 nt, Mus musculus
aagggguuucucuguac

SEQ ID NO: 3756 - RNA, 17 nt, Mus musculus
agggguuucucuguacc

SEQ ID NO: 3757 - RNA, 17 nt, Mus musculus
ggguuucucuguaccca

SEQ ID NO: 3758 - RNA, 17 nt, Mus musculus
uucucuguacccaaauc

SEQ ID NO: 3759 - RNA, 17 nt, Mus musculus
acccaaaucgggcuggu

SEQ ID NO: 3760 - RNA, 17 nt, Mus musculus
gggcugguuggaccaag

SEQ ID NO: 3761 - RNA, 17 nt, Mus musculus
agagugguugucccagc

SEQ ID NO: 3762 - RNA, 17 nt, Mus musculus
gugguugucccagcuau

SEQ ID NO: 3763 - RNA, 17 nt, Mus musculus
ucccagcuauaguuacu

SEQ ID NO: 3764 - RNA, 17 nt, Mus musculus
ccagcuauaguuacuaa

SEQ ID NO: 3765 - RNA, 17 nt, Mus musculus
gcuauaguuacuaaacu

SEQ ID NO: 3766 - RNA, 17 nt, Mus musculus
cuauaguuacuaaacua

SEQ ID NO: 3767 - RNA, 17 nt, Mus musculus
uaguuacuaaacuacuc

SEQ ID NO: 3768 - RNA, 17 nt, Mus musculus
acuaaacuacucaccca

SEQ ID NO: 3769 - RNA, 17 nt, Mus musculus
aaacuacucacccaaag

SEQ ID NO: 3770 - RNA, 17 nt, Mus musculus
cccaaaguugggaccuc

SEQ ID NO: 3771 - RNA, 17 nt, Mus musculus
ugggaccucacuggcuu

SEQ ID NO: 3772 - RNA, 17 nt, Mus musculus
cacuggcuucucuuuac

SEQ ID NO: 3773 - RNA, 17 nt, Mus musculus
acuggcuucucuuuacu

SEQ ID NO: 3774 - RNA, 17 nt, Mus musculus
uggcuucucuuuacuuc

SEQ ID NO: 3775 - RNA, 17 nt, Mus musculus
gcuucucuuuacuucau

SEQ ID NO: 3776 - RNA, 17 nt, Mus musculus
cuucucuuuacuucauc

SEQ ID NO: 3777 - RNA, 17 nt, Mus musculus
uucucuuuacuucauca

SEQ ID NO: 3778 - RNA, 17 nt, Mus musculus
ucuuuacuucaucaugg

SEQ ID NO: 3779 - RNA, 17 nt, Mus musculus
cuuuacuucaucaugga

SEQ ID NO: 3780 - RNA, 17 nt, Mus musculus
uacuucaucauggauuu

SEQ ID NO: 3781 - RNA, 17 nt, Mus musculus
ucauggauuucaccauc

SEQ ID NO: 3782 - RNA, 17 nt, Mus musculus
cauggauuucaccaucc

SEQ ID NO: 3783 - RNA, 17 nt, Mus musculus
auggauuucaccauccc

SEQ ID NO: 3784 - RNA, 17 nt, Mus musculus
uucaccaucccaaggca

SEQ ID NO: 3785 - RNA, 17 nt, Mus musculus
aaggcagucugagagga

SEQ ID NO: 3786 - RNA, 17 nt, Mus musculus
gaggagcuaaagaguau

SEQ ID NO: 3787 - RNA, 17 nt, Mus musculus
uaaagaguaucagccca

SEQ ID NO: 3788 - RNA, 17 nt, Mus musculus
aagaguaucagcccaua

SEQ ID NO: 3789 - RNA, 17 nt, Mus musculus
cagcccauauuuauuaa

SEQ ID NO: 3790 - RNA, 17 nt, Mus musculus
gcccauauuuauuaagc

SEQ ID NO: 3791 - RNA, 17 nt, Mus musculus
cccauauuuauuaagca

SEQ ID NO: 3792 - RNA, 17 nt, Mus musculus
ccauauuuauuaagcac

SEQ ID NO: 3793 - RNA, 17 nt, Mus musculus
auauuuauuaagcacuu

SEQ ID NO: 3794 - RNA, 17 nt, Mus musculus
uauuuauuaagcacuuu

SEQ ID NO: 3795 - RNA, 17 nt, Mus musculus
uaagcacuuuaugcucc

SEQ ID NO: 3796 - RNA, 17 nt, Mus musculus
aagcacuuuaugcuccu

SEQ ID NO: 3797 - RNA, 17 nt, Mus musculus
agcacuuuaugcuccuu

SEQ ID NO: 3798 - RNA, 17 nt, Mus musculus
uuuaugcuccuuggcac

SEQ ID NO: 3799 - RNA, 17 nt, Mus musculus
augcuccuuggcacagc

SEQ ID NO: 3800 - RNA, 17 nt, Mus musculus
ugauguguaauuuaugc

SEQ ID NO: 3801 - RNA, 17 nt, Mus musculus
uguguaauuuaugcaag

SEQ ID NO: 3802 - RNA, 17 nt, Mus musculus
guguaauuuaugcaagc

SEQ ID NO: 3803 - RNA, 17 nt, Mus musculus
uguaauuuaugcaagcu

SEQ ID NO: 3804 - RNA, 17 nt, Mus musculus
ugcaagcucccucucca

SEQ ID NO: 3805 - RNA, 17 nt, Mus musculus
agcucccucuccagcua

SEQ ID NO: 3806 - RNA, 17 nt, Mus musculus
cucccucuccagcuagg

SEQ ID NO: 3807 - RNA, 17 nt, Mus musculus
cuccagcuaggacucag

SEQ ID NO: 3808 - RNA, 17 nt, Mus musculus
cuaggacucaggauauu

SEQ ID NO: 3809 - RNA, 17 nt, Mus musculus
cucaggauauuagucaa

SEQ ID NO: 3810 - RNA, 17 nt, Mus musculus
caggauauuagucaaug

SEQ ID NO: 3811 - RNA, 17 nt, Mus musculus
aggauauuagucaauga

SEQ ID NO: 3812 - RNA, 17 nt, Mus musculus
auauuagucaaugagcc

SEQ ID NO: 3813 - RNA, 17 nt, Mus musculus
ugagccaucaaaaggaa

SEQ ID NO: 3814 - RNA, 17 nt, Mus musculus
aaaaaccuaucuuauuu

SEQ ID NO: 3815 - RNA, 17 nt, Mus musculus
aaaccuaucuuauuuuc

SEQ ID NO: 3816 - RNA, 17 nt, Mus musculus
accuaucuuauuuucau

SEQ ID NO: 3817 - RNA, 17 nt, Mus musculus
ccuaucuuauuuucauc

SEQ ID NO: 3818 - RNA, 17 nt, Mus musculus
uaucuuauuuucaucug

SEQ ID NO: 3819 - RNA, 17 nt, Mus musculus
aucuuauuuucaucugu

SEQ ID NO: 3820 - RNA, 17 nt, Mus musculus
ucuuauuuucaucuguu

SEQ ID NO: 3821 - RNA, 17 nt, Mus musculus
cuuauuuucaucuguuu

SEQ ID NO: 3822 - RNA, 17 nt, Mus musculus
auuuucaucuguuucau

SEQ ID NO: 3823 - RNA, 17 nt, Mus musculus
ucaucuguuucauaccu

SEQ ID NO: 3824 - RNA, 17 nt, Mus musculus
caucuguuucauaccuu

SEQ ID NO: 3825 - RNA, 17 nt, Mus musculus
aucuguuucauaccuug

SEQ ID NO: 3826 - RNA, 17 nt, Mus musculus
uguuucauaccuugucu

SEQ ID NO: 3827 - RNA, 17 nt, Mus musculus
ucauaccuugucugggg

SEQ ID NO: 3828 - RNA, 17 nt, Mus musculus
uaccuugucuggggucu

SEQ ID NO: 3829 - RNA, 17 nt, Mus musculus
ucuggggucuaaugacg

SEQ ID NO: 3830 - RNA, 17 nt, Mus musculus
uggggucuaaugacgau

SEQ ID NO: 3831 - RNA, 17 nt, Mus musculus
aacaggguagacauggg

SEQ ID NO: 3832 - RNA, 17 nt, Mus musculus
gacaggguagaaaaggg

SEQ ID NO: 3833 - RNA, 17 nt, Mus musculus
ugcccgcucuuuggggu

SEQ ID NO: 3834 - RNA, 17 nt, Mus musculus
cccgcucuuuggggucu

SEQ ID NO: 3835 - RNA, 17 nt, Mus musculus
ccgcucuuuggggucua

SEQ ID NO: 3836 - RNA, 17 nt, Mus musculus
uuuggggucuagagaug

SEQ ID NO: 3837 - RNA, 17 nt, Mus musculus
uggggucuagagaugag

SEQ ID NO: 3838 - RNA, 17 nt, Mus musculus
cccugggucucuaaaau

SEQ ID NO: 3839 - RNA, 17 nt, Mus musculus
cugggucucuaaaaugg

SEQ ID NO: 3840 - RNA, 17 nt, Mus musculus
gggucucuaaaauggcu

SEQ ID NO: 3841 - RNA, 17 nt, Mus musculus
aaauggcucucuuagaa

SEQ ID NO: 3842 - RNA, 17 nt, Mus musculus
auggcucucuuagaagu

SEQ ID NO: 3843 - RNA, 17 nt, Mus musculus
ggcucucuuagaaguug

SEQ ID NO: 3844 - RNA, 17 nt, Mus musculus
gcucucuuagaaguugu

SEQ ID NO: 3845 - RNA, 17 nt, Mus musculus
uuagaaguuguaugugc

SEQ ID NO: 3846 - RNA, 17 nt, Mus musculus
gaaguuguaugugcaaa

SEQ ID NO: 3847 - RNA, 17 nt, Mus musculus
gugcaaauuauggucug

SEQ ID NO: 3848 - RNA, 17 nt, Mus musculus
ugcaaauuauggucugu

SEQ ID NO: 3849 - RNA, 17 nt, Mus musculus
auuauggucugugugcu

SEQ ID NO: 3850 - RNA, 17 nt, Mus musculus
ugugugcuuaggucgug

SEQ ID NO: 3851 - RNA, 17 nt, Mus musculus
gugugcuuaggucgugc

SEQ ID NO: 3852 - RNA, 17 nt, Mus musculus
gcuuaggucgugcacac

SEQ ID NO: 3853 - RNA, 17 nt, Mus musculus
gagccggucacagcugg

SEQ ID NO: 3854 - RNA, 17 nt, Mus musculus
cgaugaauagcugcuuu

SEQ ID NO: 3855 - RNA, 17 nt, Mus musculus
uagcugcuuugggagag

SEQ ID NO: 3856 - RNA, 17 nt, Mus musculus
agcugcuuugggagagc

SEQ ID NO: 3857 - RNA, 17 nt, Mus musculus
agcaugcuagccacuua

SEQ ID NO: 3858 - RNA, 17 nt, Mus musculus
uagccacuuaauucucu

SEQ ID NO: 3859 - RNA, 17 nt, Mus musculus
agccacuuaauucucug

SEQ ID NO: 3860 - RNA, 17 nt, Mus musculus
cacuuaauucucugacc

SEQ ID NO: 3861 - RNA, 17 nt, Mus musculus
acuuaauucucugaccg

SEQ ID NO: 3862 - RNA, 17 nt, Mus musculus
uuaauucucugaccggg

SEQ ID NO: 3863 - RNA, 17 nt, Mus musculus
gccagcaucauggguac

SEQ ID NO: 3864 - RNA, 17 nt, Mus musculus
ucauggguaccugcucc

SEQ ID NO: 3865 - RNA, 17 nt, Mus musculus
uaccugcuccccugugu

SEQ ID NO: 3866 - RNA, 17 nt, Mus musculus
cccuguguaccccaucc

SEQ ID NO: 3867 - RNA, 17 nt, Mus musculus
uaccccauccuuaaggu

SEQ ID NO: 3868 - RNA, 17 nt, Mus musculus
cccauccuuaagguuuu

SEQ ID NO: 3869 - RNA, 17 nt, Mus musculus
ccauccuuaagguuuuc

SEQ ID NO: 3870 - RNA, 17 nt, Mus musculus
cuuaagguuuucugucu

SEQ ID NO: 3871 - RNA, 17 nt, Mus musculus
uuaagguuuucugucug

SEQ ID NO: 3872 - RNA, 17 nt, Mus musculus
uaagguuuucugucuga

SEQ ID NO: 3873 - RNA, 17 nt, Mus musculus
aagguuuucugucugau

SEQ ID NO: 3874 - RNA, 17 nt, Mus musculus
uuuucugucugaugaga

SEQ ID NO: 3875 - RNA, 17 nt, Mus musculus
agugcaauccccacuga

SEQ ID NO: 3876 - RNA, 17 nt, Mus musculus
cuguggcucuuggugca

SEQ ID NO: 3877 - RNA, 17 nt, Mus musculus
guggcucuuggugcacu

SEQ ID NO: 3878 - RNA, 17 nt, Mus musculus
ggugcacucaccagcca

SEQ ID NO: 3879 - RNA, 17 nt, Mus musculus
ccaggacuagacaagua

SEQ ID NO: 3880 - RNA, 17 nt, Mus musculus
agacaaguaggaaaggg

SEQ ID NO: 3881 - RNA, 17 nt, Mus musculus
aaagggcuucuagccac

SEQ ID NO: 3882 - RNA, 17 nt, Mus musculus
aagggcuucuagccaca

SEQ ID NO: 3883 - RNA, 17 nt, Mus musculus
gggcuucuagccacacu

SEQ ID NO: 3884 - RNA, 17 nt, Mus musculus
aagaaaaucagguaggg

SEQ ID NO: 3885 - RNA, 17 nt, Mus musculus
aaucagguagggcuggc

SEQ ID NO: 3886 - RNA, 17 nt, Mus musculus
aaagacaucuuugucca

SEQ ID NO: 3887 - RNA, 17 nt, Mus musculus
agacaucuuuguccauu

SEQ ID NO: 3888 - RNA, 17 nt, Mus musculus
gacaucuuuguccauuc

SEQ ID NO: 3889 - RNA, 17 nt, Mus musculus
aucuuuguccauucgca

SEQ ID NO: 3890 - RNA, 17 nt, Mus musculus
uuguccauucgcaaaag

SEQ ID NO: 3891 - RNA, 17 nt, Mus musculus
uguccauucgcaaaagc

SEQ ID NO: 3892 - RNA, 17 nt, Mus musculus
caaaagcucuugucggc

SEQ ID NO: 3893 - RNA, 17 nt, Mus musculus
aaagcucuugucggcug

SEQ ID NO: 3894 - RNA, 17 nt, Mus musculus
gcucuugucggcugcag

SEQ ID NO: 3895 - RNA, 17 nt, Mus musculus
caguguguaagucaggc

SEQ ID NO: 3896 - RNA, 17 nt, Mus musculus
guguaagucaggcgaug

SEQ ID NO: 3897 - RNA, 17 nt, Mus musculus
cagaggcuaccagagaa

SEQ ID NO: 3898 - RNA, 17 nt, Mus musculus
ccugagguuucucaucc

SEQ ID NO: 3899 - RNA, 17 nt, Mus musculus
cugagguuucucaucca

SEQ ID NO: 3900 - RNA, 17 nt, Mus musculus
ugagguuucucauccag

SEQ ID NO: 3901 - RNA, 17 nt, Mus musculus
agguuucucauccagau

SEQ ID NO: 3902 - RNA, 17 nt, Mus musculus
uuucucauccagauauc

SEQ ID NO: 3903 - RNA, 17 nt, Mus musculus
auccagauauccagcaa

SEQ ID NO: 3904 - RNA, 17 nt, Mus musculus
ccagauauccagcaauu

SEQ ID NO: 3905 - RNA, 17 nt, Mus musculus
ccagcaauuggggggug

SEQ ID NO: 3906 - RNA, 17 nt, Mus musculus
aagaccauagauggucc

SEQ ID NO: 3907 - RNA, 17 nt, Mus musculus
uagaugguccuguauua

SEQ ID NO: 3908 - RNA, 17 nt, Mus musculus
gguccuguauuauuccg

SEQ ID NO: 3909 - RNA, 17 nt, Mus musculus
uccuguauuauuccgau

SEQ ID NO: 3910 - RNA, 17 nt, Mus musculus
ccuguauuauuccgauu

SEQ ID NO: 3911 - RNA, 17 nt, Mus musculus
uguauuauuccgauuuu

SEQ ID NO: 3912 - RNA, 17 nt, Mus musculus
guauuauuccgauuuua

SEQ ID NO: 3913 - RNA, 17 nt, Mus musculus
auuccgauuuuaauaau

SEQ ID NO: 3914 - RNA, 17 nt, Mus musculus
uuccgauuuuaauaauc

SEQ ID NO: 3915 - RNA, 17 nt, Mus musculus
uccgauuuuaauaaucu

SEQ ID NO: 3916 - RNA, 17 nt, Mus musculus
ccgauuuuaauaaucua

SEQ ID NO: 3917 - RNA, 17 nt, Mus musculus
auuuuaauaaucuaauu

SEQ ID NO: 3918 - RNA, 17 nt, Mus musculus
uuaauaaucuaauucgu

SEQ ID NO: 3919 - RNA, 17 nt, Mus musculus
aauaaucuaauucguga

SEQ ID NO: 3920 - RNA, 17 nt, Mus musculus
aaucuaauucgugauca

SEQ ID NO: 3921 - RNA, 17 nt, Mus musculus
aucuaauucgugaucau

SEQ ID NO: 3922 - RNA, 17 nt, Mus musculus
uucgugaucauuaagag

SEQ ID NO: 3923 - RNA, 17 nt, Mus musculus
gugaucauuaagagacu

SEQ ID NO: 3924 - RNA, 17 nt, Mus musculus
ugaucauuaagagacuu

SEQ ID NO: 3925 - RNA, 17 nt, Mus musculus
aagagacuuuaguaaau

SEQ ID NO: 3926 - RNA, 17 nt, Mus musculus
agagacuuuaguaaaug

SEQ ID NO: 3927 - RNA, 17 nt, Mus musculus
gagacuuuaguaaaugu

SEQ ID NO: 3928 - RNA, 17 nt, Mus musculus
acuuuaguaaauguccc

SEQ ID NO: 3929 - RNA, 17 nt, Mus musculus
guaaaugucccuuuucc

SEQ ID NO: 3930 - RNA, 17 nt, Mus musculus
augucccuuuucccaca

SEQ ID NO: 3931 - RNA, 17 nt, Mus musculus
ugucccuuuucccacaa

SEQ ID NO: 3932 - RNA, 17 nt, Mus musculus
gucccuuuucccacaaa

SEQ ID NO: 3933 - RNA, 17 nt, Mus musculus
ucccuuuucccacaaaa

SEQ ID NO: 3934 - RNA, 17 nt, Mus musculus
acaaaaguaaagaaaag

SEQ ID NO: 3935 - RNA, 17 nt, Mus musculus
gaaaagcuaucgggauu

SEQ ID NO: 3936 - RNA, 17 nt, Mus musculus
aaagcuaucgggauucu

SEQ ID NO: 3937 - RNA, 17 nt, Mus musculus
aucgggauucucugguu

SEQ ID NO: 3938 - RNA, 17 nt, Mus musculus
ucgggauucucugguuc

SEQ ID NO: 3939 - RNA, 17 nt, Mus musculus
gggauucucugguucug

SEQ ID NO: 3940 - RNA, 17 nt, Mus musculus
ucucugguucugcuuaa

SEQ ID NO: 3941 - RNA, 17 nt, Mus musculus
cucugguucugcuuaaa

SEQ ID NO: 3942 - RNA, 17 nt, Mus musculus
guucugcuuaaagacuu

SEQ ID NO: 3943 - RNA, 17 nt, Mus musculus
uucugcuuaaagacuua

SEQ ID NO: 3944 - RNA, 17 nt, Mus musculus
uaaagacuuagcuuugg

SEQ ID NO: 3945 - RNA, 17 nt, Mus musculus
aaagacuuagcuuugga

SEQ ID NO: 3946 - RNA, 17 nt, Mus musculus
acuuagcuuuggagccu

SEQ ID NO: 3947 - RNA, 17 nt, Mus musculus
cuuagcuuuggagccua

SEQ ID NO: 3948 - RNA, 17 nt, Mus musculus
uggagccuaugaaaguu

SEQ ID NO: 3949 - RNA, 17 nt, Mus musculus
augaaaguugaucagcc

SEQ ID NO: 3950 - RNA, 18 nt, Mus musculus
auggucagcugcugggac

SEQ ID NO: 3951 - RNA, 18 nt, Mus musculus
gucagcugcugggacacc

SEQ ID NO: 3952 - RNA, 18 nt, Mus musculus
caccgcggucuugccuua

SEQ ID NO: 3953 - RNA, 18 nt, Mus musculus
acgcgcugcucggguguc

SEQ ID NO: 3954 - RNA, 18 nt, Mus musculus
ggugucugcuucucacag

SEQ ID NO: 3955 - RNA, 18 nt, Mus musculus
caggccagacucucuuuc

SEQ ID NO: 3956 - RNA, 18 nt, Mus musculus
ggaggcagcccacucaug

SEQ ID NO: 3957 - RNA, 18 nt, Mus musculus
ggucucugcccacgaccg

SEQ ID NO: 3958 - RNA, 18 nt, Mus musculus
cccaucggccugugggag

SEQ ID NO: 3959 - RNA, 18 nt, Mus musculus
gaagacagcucaucaucc

SEQ ID NO: 3960 - RNA, 18 nt, Mus musculus
auccccugccgggugacg

SEQ ID NO: 3961 - RNA, 18 nt, Mus musculus
uaccccugaugggcaaag

SEQ ID NO: 3962 - RNA, 18 nt, Mus musculus
uaggacugcugaacugcg

SEQ ID NO: 3963 - RNA, 18 nt, Mus musculus
acuaucugacccaucggc

SEQ ID NO: 3964 - RNA, 18 nt, Mus musculus
aucggcagaccaauacaa

SEQ ID NO: 3965 - RNA, 18 nt, Mus musculus
uacgcccgccgagcccag

SEQ ID NO: 3966 - RNA, 18 nt, Mus musculus
ugagacugcuccacgggc

SEQ ID NO: 3967 - RNA, 18 nt, Mus musculus
acgggcagacucuugucc

SEQ ID NO: 3968 - RNA, 18 nt, Mus musculus
ggcagcggauugaccgga

SEQ ID NO: 3969 - RNA, 18 nt, Mus musculus
uacaccugucgcgugaag

SEQ ID NO: 3970 - RNA, 18 nt, Mus musculus
cguuccagucuuucaaca

SEQ ID NO: 3971 - RNA, 18 nt, Mus musculus
ggaagcagccggugcagg

SEQ ID NO: 3972 - RNA, 18 nt, Mus musculus
gaagacgguccuaucggc

SEQ ID NO: 3973 - RNA, 18 nt, Mus musculus
ccuaucggcuguccauga

SEQ ID NO: 3974 - RNA, 18 nt, Mus musculus
aucggcuguccaugaaag

SEQ ID NO: 3975 - RNA, 18 nt, Mus musculus
gaagucugcucgcuauuu

SEQ ID NO: 3976 - RNA, 18 nt, Mus musculus
aaccucagaucuacgaaa

SEQ ID NO: 3977 - RNA, 18 nt, Mus musculus
ucuauccgcugggcagca

SEQ ID NO: 3978 - RNA, 18 nt, Mus musculus
gguggcugacucucagac

SEQ ID NO: 3979 - RNA, 18 nt, Mus musculus
acucucagaccccuggaa

SEQ ID NO: 3980 - RNA, 18 nt, Mus musculus
aucuacagcugccgggcc

SEQ ID NO: 3981 - RNA, 18 nt, Mus musculus
uacagcugccgggccuuc

SEQ ID NO: 3982 - RNA, 18 nt, Mus musculus
ugucacagaugugccgaa

SEQ ID NO: 3983 - RNA, 18 nt, Mus musculus
gaugccagccgaaggaga

SEQ ID NO: 3984 - RNA, 18 nt, Mus musculus
ugaaacuguccugugugg

SEQ ID NO: 3985 - RNA, 18 nt, Mus musculus
cacaccugcuucaaaacc

SEQ ID NO: 3986 - RNA, 18 nt, Mus musculus
cgccucagaucacuuggu

SEQ ID NO: 3987 - RNA, 18 nt, Mus musculus
aagcgcagccuaccucac

SEQ ID NO: 3988 - RNA, 18 nt, Mus musculus
uggagcugaucacgcuca

SEQ ID NO: 3989 - RNA, 18 nt, Mus musculus
ugaagcggucuucuuccg

SEQ ID NO: 3990 - RNA, 18 nt, Mus musculus
aaagacagacuaccuguc

SEQ ID NO: 3991 - RNA, 18 nt, Mus musculus
gugaacggcugcccuaug

SEQ ID NO: 3992 - RNA, 18 nt, Mus musculus
aacggcugcccuaugaug

SEQ ID NO: 3993 - RNA, 18 nt, Mus musculus
cccaccugccggacugug

SEQ ID NO: 3994 - RNA, 18 nt, Mus musculus
ccugccggacuguggcug

SEQ ID NO: 3995 - RNA, 18 nt, Mus musculus
aagcucugaugaccgaac

SEQ ID NO: 3996 - RNA, 18 nt, Mus musculus
ggccucugauggugaucg

SEQ ID NO: 3997 - RNA, 18 nt, Mus musculus
gaaaccuguccaacuacc

SEQ ID NO: 3998 - RNA, 18 nt, Mus musculus
uuauucugucucaacaag

SEQ ID NO: 3999 - RNA, 18 nt, Mus musculus
ggacgcagccuugcauau

SEQ ID NO: 4000 - RNA, 18 nt, Mus musculus
aagccccgccuagacagu

SEQ ID NO: 4001 - RNA, 18 nt, Mus musculus
gucagcagcucaaguguc

SEQ ID NO: 4002 - RNA, 18 nt, Mus musculus
gucaccagcuccagcuuc

SEQ ID NO: 4003 - RNA, 18 nt, Mus musculus
agcuccagcuucccugaa

SEQ ID NO: 4004 - RNA, 18 nt, Mus musculus
ccaagcagccccucacca

SEQ ID NO: 4005 - RNA, 18 nt, Mus musculus
aagaccugauuuccuaca

SEQ ID NO: 4006 - RNA, 18 nt, Mus musculus
uccuacaguuuccaagug

SEQ ID NO: 4007 - RNA, 18 nt, Mus musculus
aguuucuguccuccagaa

SEQ ID NO: 4008 - RNA, 18 nt, Mus musculus
gaacccugauuaugugag

SEQ ID NO: 4009 - RNA, 18 nt, Mus musculus
uucugcagccgccugaag

SEQ ID NO: 4010 - RNA, 18 nt, Mus musculus
ugcagccgccugaaggaa

SEQ ID NO: 4011 - RNA, 18 nt, Mus musculus
gcaugcggaugagaaccc

SEQ ID NO: 4012 - RNA, 18 nt, Mus musculus
ggccccgguuugcugaac

SEQ ID NO: 4013 - RNA, 18 nt, Mus musculus
gugaccugcuucaagcca

SEQ ID NO: 4014 - RNA, 18 nt, Mus musculus
ccauacugacuagaaaca

SEQ ID NO: 4015 - RNA, 18 nt, Mus musculus
aaggacggcuuugcagau

SEQ ID NO: 4016 - RNA, 18 nt, Mus musculus
cuuugcagauccacauuu

SEQ ID NO: 4017 - RNA, 18 nt, Mus musculus
aagcucugaugaugugag

SEQ ID NO: 4018 - RNA, 18 nt, Mus musculus
acuaucagcuggacacua

SEQ ID NO: 4019 - RNA, 18 nt, Mus musculus
gcacucugcugggcuccc

SEQ ID NO: 4020 - RNA, 18 nt, Mus musculus
ugaagcgguucaccugga

SEQ ID NO: 4021 - RNA, 18 nt, Mus musculus
acuuuccgaucugccgag

SEQ ID NO: 4022 - RNA, 18 nt, Mus musculus
ccgaucugccgaggccca

SEQ ID NO: 4023 - RNA, 18 nt, Mus musculus
aggcccagcuucugcuuc

SEQ ID NO: 4024 - RNA, 18 nt, Mus musculus
agcuucugcuucuccagc

SEQ ID NO: 4025 - RNA, 18 nt, Mus musculus
uucuccagcuguggccac

SEQ ID NO: 4026 - RNA, 18 nt, Mus musculus
gaguccugcuguucucca

SEQ ID NO: 4027 - RNA, 18 nt, Mus musculus
uccugcuguucuccaccc

SEQ ID NO: 4028 - RNA, 18 nt, Mus musculus
acccccagacuacaacuc

SEQ ID NO: 4029 - RNA, 18 nt, Mus musculus
ccuccccgcccgccuaaa

SEQ ID NO: 4030 - RNA, 18 nt, Mus musculus
cccgcccgccuaaagcuu

SEQ ID NO: 4031 - RNA, 18 nt, Mus musculus
cucaccagccccgacaac

SEQ ID NO: 4032 - RNA, 18 nt, Mus musculus
acaaccagccccugacag

SEQ ID NO: 4033 - RNA, 18 nt, Mus musculus
cuauuccgcuccacagga

SEQ ID NO: 4034 - RNA, 18 nt, Mus musculus
ggagccagcugcuuuucg

SEQ ID NO: 4035 - RNA, 18 nt, Mus musculus
gccagcugcuuuucguga

SEQ ID NO: 4036 - RNA, 18 nt, Mus musculus
uguugcuguuuugacuaa

SEQ ID NO: 4037 - RNA, 18 nt, Mus musculus
ggcgaccgcccgcccacc

SEQ ID NO: 4038 - RNA, 18 nt, Mus musculus
accgcccgcccaccggcc

SEQ ID NO: 4039 - RNA, 18 nt, Mus musculus
cccugcagcugugggacu

SEQ ID NO: 4040 - RNA, 18 nt, Mus musculus
augcacugaccugcucug

SEQ ID NO: 4041 - RNA, 18 nt, Mus musculus
cugaccugcucugucucu

SEQ ID NO: 4042 - RNA, 18 nt, Mus musculus
cugcucugucucucuuau

SEQ ID NO: 4043 - RNA, 18 nt, Mus musculus
ugcguccguccuguggag

SEQ ID NO: 4044 - RNA, 18 nt, Mus musculus
ggccuccgcuguuucggg

SEQ ID NO: 4045 - RNA, 18 nt, Mus musculus
cuccgcuguuucgggccc

SEQ ID NO: 4046 - RNA, 18 nt, Mus musculus
gucuucuguugucuguuu

SEQ ID NO: 4047 - RNA, 18 nt, Mus musculus
guugucuguuuaccaucc

SEQ ID NO: 4048 - RNA, 18 nt, Mus musculus
aucaucaguuccucuagu

SEQ ID NO: 4049 - RNA, 18 nt, Mus musculus
caggccugaccuucgcau

SEQ ID NO: 4050 - RNA, 18 nt, Mus musculus
gcauacugcucacgggga

SEQ ID NO: 4051 - RNA, 18 nt, Mus musculus
ugguccaguuuggccuag

SEQ ID NO: 4052 - RNA, 18 nt, Mus musculus
gccuacugaugggcucaa

SEQ ID NO: 4053 - RNA, 18 nt, Mus musculus
uuauccuguuuuauauau

SEQ ID NO: 4054 - RNA, 18 nt, Mus musculus
caaggcagucugagagga

SEQ ID NO: 4055 - RNA, 18 nt, Mus musculus
aguaucagcccauauuua

SEQ ID NO: 4056 - RNA, 18 nt, Mus musculus
uucaucuguuucauaccu

SEQ ID NO: 4057 - RNA, 18 nt, Mus musculus
ggugcccgcucuuugggg

SEQ ID NO: 4058 - RNA, 18 nt, Mus musculus
cacaccugccggagccgg

SEQ ID NO: 4059 - RNA, 18 nt, Mus musculus
ggucacagcugggcagac

SEQ ID NO: 4060 - RNA, 18 nt, Mus musculus
cugggcagacgaugaaua

SEQ ID NO: 4061 - RNA, 18 nt, Mus musculus
aauagcugcuuugggaga

SEQ ID NO: 4062 - RNA, 18 nt, Mus musculus
auucucugaccgggccag

SEQ ID NO: 4063 - RNA, 18 nt, Mus musculus
gguaccugcuccccugug

SEQ ID NO: 4064 - RNA, 18 nt, Mus musculus
guuuucugucugaugaga

SEQ ID NO: 4065 - RNA, 18 nt, Mus musculus
ucugucugaugagacugg

SEQ ID NO: 4066 - RNA, 18 nt, Mus musculus
ugagacagccugcagccc

SEQ ID NO: 4067 - RNA, 18 nt, Mus musculus
gccugcagcccacugugg

SEQ ID NO: 4068 - RNA, 18 nt, Mus musculus
cuugucggcugcagugug

SEQ ID NO: 4069 - RNA, 18 nt, Mus musculus
agaaacggaugagaacag

SEQ ID NO: 4070 - RNA, 18 nt, Mus musculus
aacagcagccugagguuu

SEQ ID NO: 4071 - RNA, 18 nt, Mus musculus
uuauuccgauuuuaauaa

SEQ ID NO: 4072 - RNA, 18 nt, Mus musculus
ugguucugcuuaaagacu

SEQ ID NO: 4073 - RNA, 15 nt, Homo sapiens
ccgggauauuuauaa

SEQ ID NO: 4074 - RNA, 15 nt, Homo sapiens
aauguauacacaggg

SEQ ID NO: 4075 - RNA, 15 nt, Homo sapiens
ugcaaauauggaaau

SEQ ID NO: 4076 - RNA, 15 nt, Homo sapiens
cucccuuaugaugcc

SEQ ID NO: 4077 - RNA, 15 nt, Homo sapiens
guugaauacugcaaa

SEQ ID NO: 4078 - RNA, 15 nt, Homo sapiens
uaugguuaaaagaug

SEQ ID NO: 4079 - RNA, 15 nt, Homo sapiens
gggauauuuauaaga

SEQ ID NO: 4080 - RNA, 15 nt, Homo sapiens
ggauauuuauaagaa

SEQ ID NO: 4081 - RNA, 15 nt, Homo sapiens
acgugguuaaccugc

SEQ ID NO: 4082 - RNA, 15 nt, Homo sapiens
uauuucuagucauga

SEQ ID NO: 4083 - RNA, 15 nt, Homo sapiens
caauaauagaaggaa

SEQ ID NO: 4084 - RNA, 15 nt, Homo sapiens
gagacuuaaacuggg

SEQ ID NO: 4085 - RNA, 15 nt, Homo sapiens
gaugacuaccagggc

SEQ ID NO: 4086 - RNA, 15 nt, Homo sapiens
uuaauguagaaagaa

SEQ ID NO: 4087 - RNA, 15 nt, Homo sapiens
gccauuuaugacaaa

SEQ ID NO: 4088 - RNA, 15 nt, Homo sapiens
gucaaauuacuuaga

SEQ ID NO: 4089 - RNA, 15 nt, Homo sapiens
auaaaguugggacug

SEQ ID NO: 4090 - RNA, 15 nt, Homo sapiens
acuugguuuaaaaac

SEQ ID NO: 4091 - RNA, 15 nt, Homo sapiens
aagugguucaagcau

SEQ ID NO: 4092 - RNA, 15 nt, Homo sapiens
uucuccuuagguggg

SEQ ID NO: 4093 - RNA, 15 nt, Homo sapiens
ucuccuuaggugggu

SEQ ID NO: 4094 - RNA, 15 nt, Homo sapiens
guacucuacuccuga

SEQ ID NO: 4095 - RNA, 15 nt, Homo sapiens
agcaccuugguugug

SEQ ID NO: 4096 - RNA, 15 nt, Homo sapiens
ggcaaaucacuugga

SEQ ID NO: 4097 - RNA, 15 nt, Homo sapiens
caagcaucagcauuu

SEQ ID NO: 4098 - RNA, 15 nt, Homo sapiens
gagagcuccugagua

SEQ ID NO: 4099 - RNA, 15 nt, Homo sapiens
aaggccucgcucaag

SEQ ID NO: 4100 - RNA, 15 nt, Homo sapiens
ucuccauaucaaaac

SEQ ID NO: 4101 - RNA, 15 nt, Homo sapiens
auguauuuuguauac

SEQ ID NO: 4102 - RNA, 15 nt, Homo sapiens
cuagaauuucuggaa

SEQ ID NO: 4103 - RNA, 15 nt, Homo sapiens
cucucuucuggcucc

SEQ ID NO: 4104 - RNA, 15 nt, Homo sapiens
cuguacuccacccca

SEQ ID NO: 4105 - RNA, 15 nt, Homo sapiens
acaugguuugguccu

SEQ ID NO: 4106 - RNA, 15 nt, Homo sapiens
auggucuuugccuga

SEQ ID NO: 4107 - RNA, 15 nt, Homo sapiens
gcaccauaccuccug

SEQ ID NO: 4108 - RNA, 15 nt, Homo sapiens
gggcuuuuggaaaag

SEQ ID NO: 4109 - RNA, 15 nt, Homo sapiens
ccagacuacaacucg

SEQ ID NO: 4110 - RNA, 15 nt, Homo sapiens
guuuucuccauauca

SEQ ID NO: 4111 - RNA, 15 nt, Homo sapiens
agaauguaugccucu

SEQ ID NO: 4112 - RNA, 15 nt, Homo sapiens
auucccuagugagcc

SEQ ID NO: 4113 - RNA, 15 nt, Homo sapiens
uguuguuccucuucu

SEQ ID NO: 4114 - RNA, 15 nt, Homo sapiens
gcuuccuuuuaucca

SEQ ID NO: 4115 - RNA, 15 nt, Homo sapiens
uauauauucucugcu

SEQ ID NO: 4116 - RNA, 15 nt, Homo sapiens
aguguauccacaggg

SEQ ID NO: 4117 - RNA, 15 nt, Homo sapiens
ugcaaauuuggaaac

SEQ ID NO: 4118 - RNA, 15 nt, Homo sapiens
cugccuuaugaugcc

SEQ ID NO: 4119 - RNA, 15 nt, Homo sapiens
guggaauucugcaaa

SEQ ID NO: 4120 - RNA, 15 nt, Homo sapiens
ugugguuuaaagaua

SEQ ID NO: 4121 - RNA, 15 nt, Homo sapiens
gggauauuuauaaag

SEQ ID NO: 4122 - RNA, 15 nt, Homo sapiens
ggauauuuauaaaga

SEQ ID NO: 4123 - RNA, 15 nt, Homo sapiens
auguggucaaccuuc

SEQ ID NO: 4124 - RNA, 15 nt, Homo sapiens
uacuucuugucauca

SEQ ID NO: 4125 - RNA, 15 nt, Homo sapiens
cucuaauugaaggaa

SEQ ID NO: 4126 - RNA, 15 nt, Homo sapiens
uugacuucaacuggg

SEQ ID NO: 4127 - RNA, 15 nt, Homo sapiens
gaggacuuccaggga

SEQ ID NO: 4128 - RNA, 15 nt, Homo sapiens
aaaauguugaaagaa

SEQ ID NO: 4129 - RNA, 15 nt, Homo sapiens
acaauuuuugacaga

SEQ ID NO: 4130 - RNA, 15 nt, Homo sapiens
uucaaauuacuugca

SEQ ID NO: 4131 - RNA, 15 nt, Homo sapiens
acaaagucgggagag

SEQ ID NO: 4132 - RNA, 15 nt, Homo sapiens
aaaugguauaaaaau

SEQ ID NO: 4133 - RNA, 15 nt, Homo sapiens
acaugguacaagcuu

SEQ ID NO: 4134 - RNA, 15 nt, Homo sapiens
uuuuccuuaggugcu

SEQ ID NO: 4135 - RNA, 15 nt, Homo sapiens
uuuccuuaggugcuu

SEQ ID NO: 4136 - RNA, 15 nt, Homo sapiens
gagcucuccuccugu

SEQ ID NO: 4137 - RNA, 15 nt, Homo sapiens
aguaccuugguuacc

SEQ ID NO: 4138 - RNA, 15 nt, Homo sapiens
gaagcaucagcauaa

SEQ ID NO: 4139 - RNA, 15 nt, Homo sapiens
ggaagcuccugaaga

SEQ ID NO: 4140 - RNA, 15 nt, Homo sapiens
ucugccuugcucaag

SEQ ID NO: 4141 - RNA, 15 nt, Homo sapiens
gguccauuucaaauc

SEQ ID NO: 4142 - RNA, 15 nt, Homo sapiens
gucuauuauguacau

SEQ ID NO: 4143 - RNA, 15 nt, Homo sapiens
auggaaucucuggug

SEQ ID NO: 4144 - RNA, 15 nt, Homo sapiens
uguucuucuggcuac

SEQ ID NO: 4145 - RNA, 15 nt, Homo sapiens
uuauacuacaccaga

SEQ ID NO: 4146 - RNA, 15 nt, Homo sapiens
cagugguaugguucu

SEQ ID NO: 4147 - RNA, 15 nt, Homo sapiens
acggucuaugccauu

SEQ ID NO: 4148 - RNA, 15 nt, Homo sapiens
augccauuccucccc

SEQ ID NO: 4149 - RNA, 15 nt, Homo sapiens
uugcuuuuggaagug

SEQ ID NO: 4150 - RNA, 15 nt, Homo sapiens
auugacuucaacugg

SEQ ID NO: 4151 - RNA, 15 nt, Homo sapiens
ugcuucuccauaucc

SEQ ID NO: 4152 - RNA, 15 nt, Homo sapiens
acuaugucugccuug

SEQ ID NO: 4153 - RNA, 15 nt, Homo sapiens
auacccuugugaaga

SEQ ID NO: 4154 - RNA, 15 nt, Homo sapiens
uaguguuucucuuga

SEQ ID NO: 4155 - RNA, 15 nt, Homo sapiens
auauccucuuaucgg

SEQ ID NO: 4156 - RNA, 15 nt, Homo sapiens
gaaauauccucuuau

SEQ ID NO: 4157 - RNA, 17 nt, Homo sapiens
gcggacacuccucucgg

SEQ ID NO: 4158 - RNA, 17 nt, Homo sapiens
ggacacuccucucggcu

SEQ ID NO: 4159 - RNA, 17 nt, Homo sapiens
gacacuccucucggcuc

SEQ ID NO: 4160 - RNA, 17 nt, Homo sapiens
cacuccucucggcuccu

SEQ ID NO: 4161 - RNA, 17 nt, Homo sapiens
cucucggcuccuccccg

SEQ ID NO: 4162 - RNA, 17 nt, Homo sapiens
cucggcuccuccccggc

SEQ ID NO: 4163 - RNA, 17 nt, Homo sapiens
ucggcuccuccccggca

SEQ ID NO: 4164 - RNA, 17 nt, Homo sapiens
ggcuccuccccggcagc

SEQ ID NO: 4165 - RNA, 17 nt, Homo sapiens
gcuccuccccggcagcg

SEQ ID NO: 4166 - RNA, 17 nt, Homo sapiens
cuccuccccggcagcgg

SEQ ID NO: 4167 - RNA, 17 nt, Homo sapiens
uccccggcagcggcggc

SEQ ID NO: 4168 - RNA, 17 nt, Homo sapiens
gcggcggcucggagcgg

SEQ ID NO: 4169 - RNA, 17 nt, Homo sapiens
gagcgggcuccggggcu

SEQ ID NO: 4170 - RNA, 17 nt, Homo sapiens
gcgggcuccggggcucg

SEQ ID NO: 4171 - RNA, 17 nt, Homo sapiens
uccggggcucgggugca

SEQ ID NO: 4172 - RNA, 17 nt, Homo sapiens
ucgggugcagcggccag

SEQ ID NO: 4173 - RNA, 17 nt, Homo sapiens
gcagcggccagcgggcc

SEQ ID NO: 4174 - RNA, 17 nt, Homo sapiens
cagcggccagcgggccu

SEQ ID NO: 4175 - RNA, 17 nt, Homo sapiens
cagcgggccuggcggcg

SEQ ID NO: 4176 - RNA, 17 nt, Homo sapiens
agcgggccuggcggcga

SEQ ID NO: 4177 - RNA, 17 nt, Homo sapiens
aggauuacccggggaag

SEQ ID NO: 4178 - RNA, 17 nt, Homo sapiens
ggauuacccggggaagu

SEQ ID NO: 4179 - RNA, 17 nt, Homo sapiens
ugguugucuccuggcug

SEQ ID NO: 4180 - RNA, 17 nt, Homo sapiens
guugucuccuggcugga

SEQ ID NO: 4181 - RNA, 17 nt, Homo sapiens
uugucuccuggcuggag

SEQ ID NO: 4182 - RNA, 17 nt, Homo sapiens
cuccuggcuggagccgc

SEQ ID NO: 4183 - RNA, 17 nt, Homo sapiens
gcuggagccgcgagacg

SEQ ID NO: 4184 - RNA, 17 nt, Homo sapiens
acgggcgcucagggcgc

SEQ ID NO: 4185 - RNA, 17 nt, Homo sapiens
gggcgcucagggcgcgg

SEQ ID NO: 4186 - RNA, 17 nt, Homo sapiens
cgcggggccggcggcgg

SEQ ID NO: 4187 - RNA, 17 nt, Homo sapiens
ggacggacucuggcggc

SEQ ID NO: 4188 - RNA, 17 nt, Homo sapiens
acggacucuggcggccg

SEQ ID NO: 4189 - RNA, 17 nt, Homo sapiens
cuggcggccgggucguu

SEQ ID NO: 4190 - RNA, 17 nt, Homo sapiens
ucguuggccgggggagc

SEQ ID NO: 4191 - RNA, 17 nt, Homo sapiens
gcgcgggcaccgggcga

SEQ ID NO: 4192 - RNA, 17 nt, Homo sapiens
gcgggcaccgggcgagc

SEQ ID NO: 4193 - RNA, 17 nt, Homo sapiens
gggcgagcaggccgcgu

SEQ ID NO: 4194 - RNA, 17 nt, Homo sapiens
gagcaggccgcgucgcg

SEQ ID NO: 4195 - RNA, 17 nt, Homo sapiens
cgucgcgcucaccaugg

SEQ ID NO: 4196 - RNA, 17 nt, Homo sapiens
ucgcgcucaccaugguc

SEQ ID NO: 4197 - RNA, 17 nt, Homo sapiens
gcgcucaccauggucag

SEQ ID NO: 4198 - RNA, 17 nt, Homo sapiens
cgcucaccauggucagc

SEQ ID NO: 4199 - RNA, 17 nt, Homo sapiens
ccauggucagcuacugg

SEQ ID NO: 4200 - RNA, 17 nt, Homo sapiens
uggucagcuacugggac

SEQ ID NO: 4201 - RNA, 17 nt, Homo sapiens
ucagcuacugggacacc

SEQ ID NO: 4202 - RNA, 17 nt, Homo sapiens
acugggacaccgggguc

SEQ ID NO: 4203 - RNA, 17 nt, Homo sapiens
ugggacaccgggguccu

SEQ ID NO: 4204 - RNA, 17 nt, Homo sapiens
ccgggguccugcugugc

SEQ ID NO: 4205 - RNA, 17 nt, Homo sapiens
cgggguccugcugugcg

SEQ ID NO: 4206 - RNA, 17 nt, Homo sapiens
gguccugcugugcgcgc

SEQ ID NO: 4207 - RNA, 17 nt, Homo sapiens
gugcgcgcugcucagcu

SEQ ID NO: 4208 - RNA, 17 nt, Homo sapiens
cgcgcugcucagcuguc

SEQ ID NO: 4209 - RNA, 17 nt, Homo sapiens
cgcugcucagcugucug

SEQ ID NO: 4210 - RNA, 17 nt, Homo sapiens
ugcucagcugucugcuu

SEQ ID NO: 4211 - RNA, 17 nt, Homo sapiens
cagcugucugcuucuca

SEQ ID NO: 4212 - RNA, 17 nt, Homo sapiens
cugucugcuucucacag

SEQ ID NO: 4213 - RNA, 17 nt, Homo sapiens
ucugcuucucacaggau

SEQ ID NO: 4214 - RNA, 17 nt, Homo sapiens
ugcuucucacaggaucu

SEQ ID NO: 4215 - RNA, 17 nt, Homo sapiens
cuucucacaggaucuag

SEQ ID NO: 4216 - RNA, 17 nt, Homo sapiens
acaggaucuaguucagg

SEQ ID NO: 4217 - RNA, 17 nt, Homo sapiens
ucuaguucagguucaaa

SEQ ID NO: 4218 - RNA, 17 nt, Homo sapiens
ucagguucaaaauuaaa

SEQ ID NO: 4219 - RNA, 17 nt, Homo sapiens
aaaagauccugaacuga

SEQ ID NO: 4220 - RNA, 17 nt, Homo sapiens
aaagauccugaacugag

SEQ ID NO: 4221 - RNA, 17 nt, Homo sapiens
uccugaacugaguuuaa

SEQ ID NO: 4222 - RNA, 17 nt, Homo sapiens
uaaaaggcacccagcac

SEQ ID NO: 4223 - RNA, 17 nt, Homo sapiens
aaaggcacccagcacau

SEQ ID NO: 4224 - RNA, 17 nt, Homo sapiens
aaggcacccagcacauc

SEQ ID NO: 4225 - RNA, 17 nt, Homo sapiens
aggcacccagcacauca

SEQ ID NO: 4226 - RNA, 17 nt, Homo sapiens
cacccagcacaucaugc

SEQ ID NO: 4227 - RNA, 17 nt, Homo sapiens
cccagcacaucaugcaa

SEQ ID NO: 4228 - RNA, 17 nt, Homo sapiens
agcacaucaugcaagca

SEQ ID NO: 4229 - RNA, 17 nt, Homo sapiens
caucaugcaagcaggcc

SEQ ID NO: 4230 - RNA, 17 nt, Homo sapiens
augcaagcaggccagac

SEQ ID NO: 4231 - RNA, 17 nt, Homo sapiens
aagcaggccagacacug

SEQ ID NO: 4232 - RNA, 17 nt, Homo sapiens
agcaggccagacacugc

SEQ ID NO: 4233 - RNA, 17 nt, Homo sapiens
ggccagacacugcaucu

SEQ ID NO: 4234 - RNA, 17 nt, Homo sapiens
ccagacacugcaucucc

SEQ ID NO: 4235 - RNA, 17 nt, Homo sapiens
gacacugcaucuccaau

SEQ ID NO: 4236 - RNA, 17 nt, Homo sapiens
acugcaucuccaaugca

SEQ ID NO: 4237 - RNA, 17 nt, Homo sapiens
ugcaucuccaaugcagg

SEQ ID NO: 4238 - RNA, 17 nt, Homo sapiens
gcaucuccaaugcaggg

SEQ ID NO: 4239 - RNA, 17 nt, Homo sapiens
uccaaugcaggggggaa

SEQ ID NO: 4240 - RNA, 17 nt, Homo sapiens
ggggaagcagcccauaa

SEQ ID NO: 4241 - RNA, 17 nt, Homo sapiens
gaagcagcccauaaaug

SEQ ID NO: 4242 - RNA, 17 nt, Homo sapiens
aagcagcccauaaaugg

SEQ ID NO: 4243 - RNA, 17 nt, Homo sapiens
agcagcccauaaauggu

SEQ ID NO: 4244 - RNA, 17 nt, Homo sapiens
aaauggucuuugccuga

SEQ ID NO: 4245 - RNA, 17 nt, Homo sapiens
gucuuugccugaaaugg

SEQ ID NO: 4246 - RNA, 17 nt, Homo sapiens
ucuuugccugaaauggu

SEQ ID NO: 4247 - RNA, 17 nt, Homo sapiens
cgaaaggcugagcauaa

SEQ ID NO: 4248 - RNA, 17 nt, Homo sapiens
ggcugagcauaacuaaa

SEQ ID NO: 4249 - RNA, 17 nt, Homo sapiens
agcauaacuaaaucugc

SEQ ID NO: 4250 - RNA, 17 nt, Homo sapiens
acuaaaucugccugugg

SEQ ID NO: 4251 - RNA, 17 nt, Homo sapiens
aaaucugccuguggaag

SEQ ID NO: 4252 - RNA, 17 nt, Homo sapiens
aaucugccuguggaaga

SEQ ID NO: 4253 - RNA, 17 nt, Homo sapiens
gaaauggcaaacaauuc

SEQ ID NO: 4254 - RNA, 17 nt, Homo sapiens
uggcaaacaauucugca

SEQ ID NO: 4255 - RNA, 17 nt, Homo sapiens
aacaauucugcaguacu

SEQ ID NO: 4256 - RNA, 17 nt, Homo sapiens
aauucugcaguacuuua

SEQ ID NO: 4257 - RNA, 17 nt, Homo sapiens
ugcaguacuuuaaccuu

SEQ ID NO: 4258 - RNA, 17 nt, Homo sapiens
acuuuaaccuugaacac

SEQ ID NO: 4259 - RNA, 17 nt, Homo sapiens
cuuuaaccuugaacaca

SEQ ID NO: 4260 - RNA, 17 nt, Homo sapiens
ccuugaacacagcucaa

SEQ ID NO: 4261 - RNA, 17 nt, Homo sapiens
uugaacacagcucaagc

SEQ ID NO: 4262 - RNA, 17 nt, Homo sapiens
aacacagcucaagcaaa

SEQ ID NO: 4263 - RNA, 17 nt, Homo sapiens
cacagcucaagcaaacc

SEQ ID NO: 4264 - RNA, 17 nt, Homo sapiens
gcucaagcaaaccacac

SEQ ID NO: 4265 - RNA, 17 nt, Homo sapiens
aagcaaaccacacuggc

SEQ ID NO: 4266 - RNA, 17 nt, Homo sapiens
agcaaaccacacuggcu

SEQ ID NO: 4267 - RNA, 17 nt, Homo sapiens
caaaccacacuggcuuc

SEQ ID NO: 4268 - RNA, 17 nt, Homo sapiens
aaccacacuggcuucua

SEQ ID NO: 4269 - RNA, 17 nt, Homo sapiens
acacuggcuucuacagc

SEQ ID NO: 4270 - RNA, 17 nt, Homo sapiens
cuggcuucuacagcugc

SEQ ID NO: 4271 - RNA, 17 nt, Homo sapiens
gcuucuacagcugcaaa

SEQ ID NO: 4272 - RNA, 17 nt, Homo sapiens
ucuacagcugcaaauau

SEQ ID NO: 4273 - RNA, 17 nt, Homo sapiens
acagcugcaaauaucua

SEQ ID NO: 4274 - RNA, 17 nt, Homo sapiens
caaauaucuagcuguac

SEQ ID NO: 4275 - RNA, 17 nt, Homo sapiens
uaucuagcuguaccuac

SEQ ID NO: 4276 - RNA, 17 nt, Homo sapiens
agcuguaccuacuucaa

SEQ ID NO: 4277 - RNA, 17 nt, Homo sapiens
gcuguaccuacuucaaa

SEQ ID NO: 4278 - RNA, 17 nt, Homo sapiens
guaccuacuucaaagaa

SEQ ID NO: 4279 - RNA, 17 nt, Homo sapiens
ccuacuucaaagaagaa

SEQ ID NO: 4280 - RNA, 17 nt, Homo sapiens
aaggaaacagaaucugc

SEQ ID NO: 4281 - RNA, 17 nt, Homo sapiens
acagaaucugcaaucua

SEQ ID NO: 4282 - RNA, 17 nt, Homo sapiens
gaaucugcaaucuauau

SEQ ID NO: 4283 - RNA, 17 nt, Homo sapiens
cugcaaucuauauauuu

SEQ ID NO: 4284 - RNA, 17 nt, Homo sapiens
agugauacagguagacc

SEQ ID NO: 4285 - RNA, 17 nt, Homo sapiens
agguagaccuuucguag

SEQ ID NO: 4286 - RNA, 17 nt, Homo sapiens
gguagaccuuucguaga

SEQ ID NO: 4287 - RNA, 17 nt, Homo sapiens
agauguacagugaaauc

SEQ ID NO: 4288 - RNA, 17 nt, Homo sapiens
gugaaauccccgaaauu

SEQ ID NO: 4289 - RNA, 17 nt, Homo sapiens
ugaaauccccgaaauua

SEQ ID NO: 4290 - RNA, 17 nt, Homo sapiens
gaaauccccgaaauuau

SEQ ID NO: 4291 - RNA, 17 nt, Homo sapiens
aauuauacacaugacug

SEQ ID NO: 4292 - RNA, 17 nt, Homo sapiens
uuauacacaugacugaa

SEQ ID NO: 4293 - RNA, 17 nt, Homo sapiens
cacaugacugaaggaag

SEQ ID NO: 4294 - RNA, 17 nt, Homo sapiens
aagggagcucgucauuc

SEQ ID NO: 4295 - RNA, 17 nt, Homo sapiens
agcucgucauucccugc

SEQ ID NO: 4296 - RNA, 17 nt, Homo sapiens
cgucauucccugccggg

SEQ ID NO: 4297 - RNA, 17 nt, Homo sapiens
gucauucccugccgggu

SEQ ID NO: 4298 - RNA, 17 nt, Homo sapiens
ucauucccugccggguu

SEQ ID NO: 4299 - RNA, 17 nt, Homo sapiens
uucccugccggguuacg

SEQ ID NO: 4300 - RNA, 17 nt, Homo sapiens
guuacgucaccuaacau

SEQ ID NO: 4301 - RNA, 17 nt, Homo sapiens
uacgucaccuaacauca

SEQ ID NO: 4302 - RNA, 17 nt, Homo sapiens
acgucaccuaacaucac

SEQ ID NO: 4303 - RNA, 17 nt, Homo sapiens
caccuaacaucacuguu

SEQ ID NO: 4304 - RNA, 17 nt, Homo sapiens
cuaacaucacuguuacu

SEQ ID NO: 4305 - RNA, 17 nt, Homo sapiens
aacaucacuguuacuuu

SEQ ID NO: 4306 - RNA, 17 nt, Homo sapiens
acuguuacuuuaaaaaa

SEQ ID NO: 4307 - RNA, 17 nt, Homo sapiens
aaaguuuccacuugaca

SEQ ID NO: 4308 - RNA, 17 nt, Homo sapiens
aaguuuccacuugacac

SEQ ID NO: 4309 - RNA, 17 nt, Homo sapiens
guuuccacuugacacuu

SEQ ID NO: 4310 - RNA, 17 nt, Homo sapiens
cacuugacacuuugauc

SEQ ID NO: 4311 - RNA, 17 nt, Homo sapiens
cuugacacuuugauccc

SEQ ID NO: 4312 - RNA, 17 nt, Homo sapiens
cuuugaucccugaugga

SEQ ID NO: 4313 - RNA, 17 nt, Homo sapiens
uuugaucccugauggaa

SEQ ID NO: 4314 - RNA, 17 nt, Homo sapiens
uugaucccugauggaaa

SEQ ID NO: 4315 - RNA, 17 nt, Homo sapiens
gaaaacgcauaaucugg

SEQ ID NO: 4316 - RNA, 17 nt, Homo sapiens
gcauaaucugggacagu

SEQ ID NO: 4317 - RNA, 17 nt, Homo sapiens
ucugggacaguagaaag

SEQ ID NO: 4318 - RNA, 17 nt, Homo sapiens
gaaagggcuucaucaua

SEQ ID NO: 4319 - RNA, 17 nt, Homo sapiens
agggcuucaucauauca

SEQ ID NO: 4320 - RNA, 17 nt, Homo sapiens
gcuucaucauaucaaau

SEQ ID NO: 4321 - RNA, 17 nt, Homo sapiens
aucauaucaaaugcaac

SEQ ID NO: 4322 - RNA, 17 nt, Homo sapiens
ucaaaugcaacguacaa

SEQ ID NO: 4323 - RNA, 17 nt, Homo sapiens
caacguacaaagaaaua

SEQ ID NO: 4324 - RNA, 17 nt, Homo sapiens
aauagggcuucugaccu

SEQ ID NO: 4325 - RNA, 17 nt, Homo sapiens
agggcuucugaccugug

SEQ ID NO: 4326 - RNA, 17 nt, Homo sapiens
cuucugaccugugaagc

SEQ ID NO: 4327 - RNA, 17 nt, Homo sapiens
uucugaccugugaagca

SEQ ID NO: 4328 - RNA, 17 nt, Homo sapiens
ugugaagcaacagucaa

SEQ ID NO: 4329 - RNA, 17 nt, Homo sapiens
gaagcaacagucaaugg

SEQ ID NO: 4330 - RNA, 17 nt, Homo sapiens
caacagucaaugggcau

SEQ ID NO: 4331 - RNA, 17 nt, Homo sapiens
caaugggcauuuguaua

SEQ ID NO: 4332 - RNA, 17 nt, Homo sapiens
uauaagacaaacuaucu

SEQ ID NO: 4333 - RNA, 17 nt, Homo sapiens
agacaaacuaucucaca

SEQ ID NO: 4334 - RNA, 17 nt, Homo sapiens
aaacuaucucacacauc

SEQ ID NO: 4335 - RNA, 17 nt, Homo sapiens
acuaucucacacaucga

SEQ ID NO: 4336 - RNA, 17 nt, Homo sapiens
uaucucacacaucgaca

SEQ ID NO: 4337 - RNA, 17 nt, Homo sapiens
ucucacacaucgacaaa

SEQ ID NO: 4338 - RNA, 17 nt, Homo sapiens
acaucgacaaaccaaua

SEQ ID NO: 4339 - RNA, 17 nt, Homo sapiens
cgacaaaccaauacaau

SEQ ID NO: 4340 - RNA, 17 nt, Homo sapiens
gacaaaccaauacaauc

SEQ ID NO: 4341 - RNA, 17 nt, Homo sapiens
accaauacaaucauaga

SEQ ID NO: 4342 - RNA, 17 nt, Homo sapiens
auacaaucauagauguc

SEQ ID NO: 4343 - RNA, 17 nt, Homo sapiens
uagauguccaaauaagc

SEQ ID NO: 4344 - RNA, 17 nt, Homo sapiens
agauguccaaauaagca

SEQ ID NO: 4345 - RNA, 17 nt, Homo sapiens
aaauaagcacaccacgc

SEQ ID NO: 4346 - RNA, 17 nt, Homo sapiens
auaagcacaccacgccc

SEQ ID NO: 4347 - RNA, 17 nt, Homo sapiens
aagcacaccacgcccag

SEQ ID NO: 4348 - RNA, 17 nt, Homo sapiens
agcacaccacgcccagu

SEQ ID NO: 4349 - RNA, 17 nt, Homo sapiens
caccacgcccagucaaa

SEQ ID NO: 4350 - RNA, 17 nt, Homo sapiens
accacgcccagucaaau

SEQ ID NO: 4351 - RNA, 17 nt, Homo sapiens
ccacgcccagucaaauu

SEQ ID NO: 4352 - RNA, 17 nt, Homo sapiens
gcccagucaaauuacuu

SEQ ID NO: 4353 - RNA, 17 nt, Homo sapiens
caaauuacuuagaggcc

SEQ ID NO: 4354 - RNA, 17 nt, Homo sapiens
uuagaggccauacucuu

SEQ ID NO: 4355 - RNA, 17 nt, Homo sapiens
uagaggccauacucuug

SEQ ID NO: 4356 - RNA, 17 nt, Homo sapiens
ggccauacucuuguccu

SEQ ID NO: 4357 - RNA, 17 nt, Homo sapiens
ccauacucuuguccuca

SEQ ID NO: 4358 - RNA, 17 nt, Homo sapiens
cucuuguccucaauugu

SEQ ID NO: 4359 - RNA, 17 nt, Homo sapiens
ucuuguccucaauugua

SEQ ID NO: 4360 - RNA, 17 nt, Homo sapiens
uuguccucaauuguacu

SEQ ID NO: 4361 - RNA, 17 nt, Homo sapiens
aauuguacugcuaccac

SEQ ID NO: 4362 - RNA, 17 nt, Homo sapiens
uguacugcuaccacucc

SEQ ID NO: 4363 - RNA, 17 nt, Homo sapiens
acugcuaccacucccuu

SEQ ID NO: 4364 - RNA, 17 nt, Homo sapiens
cugcuaccacucccuug

SEQ ID NO: 4365 - RNA, 17 nt, Homo sapiens
gcuaccacucccuugaa

SEQ ID NO: 4366 - RNA, 17 nt, Homo sapiens
uaccacucccuugaaca

SEQ ID NO: 4367 - RNA, 17 nt, Homo sapiens
accacucccuugaacac

SEQ ID NO: 4368 - RNA, 17 nt, Homo sapiens
ccacucccuugaacacg

SEQ ID NO: 4369 - RNA, 17 nt, Homo sapiens
ccuugaacacgagaguu

SEQ ID NO: 4370 - RNA, 17 nt, Homo sapiens
gagaguucaaaugaccu

SEQ ID NO: 4371 - RNA, 17 nt, Homo sapiens
caaaugaccuggaguua

SEQ ID NO: 4372 - RNA, 17 nt, Homo sapiens
aaaugaccuggaguuac

SEQ ID NO: 4373 - RNA, 17 nt, Homo sapiens
ggaguuacccugaugaa

SEQ ID NO: 4374 - RNA, 17 nt, Homo sapiens
gaguuacccugaugaaa

SEQ ID NO: 4375 - RNA, 17 nt, Homo sapiens
aguuacccugaugaaaa

SEQ ID NO: 4376 - RNA, 17 nt, Homo sapiens
aagagagcuuccguaag

SEQ ID NO: 4377 - RNA, 17 nt, Homo sapiens
agagcuuccguaaggcg

SEQ ID NO: 4378 - RNA, 17 nt, Homo sapiens
gaauugaccaaagcaau

SEQ ID NO: 4379 - RNA, 17 nt, Homo sapiens
aauugaccaaagcaauu

SEQ ID NO: 4380 - RNA, 17 nt, Homo sapiens
accaaagcaauucccau

SEQ ID NO: 4381 - RNA, 17 nt, Homo sapiens
agcaauucccaugccaa

SEQ ID NO: 4382 - RNA, 17 nt, Homo sapiens
gcaauucccaugccaac

SEQ ID NO: 4383 - RNA, 17 nt, Homo sapiens
caauucccaugccaaca

SEQ ID NO: 4384 - RNA, 17 nt, Homo sapiens
ucccaugccaacauauu

SEQ ID NO: 4385 - RNA, 17 nt, Homo sapiens
cccaugccaacauauuc

SEQ ID NO: 4386 - RNA, 17 nt, Homo sapiens
augccaacauauucuac

SEQ ID NO: 4387 - RNA, 17 nt, Homo sapiens
acauauucuacaguguu

SEQ ID NO: 4388 - RNA, 17 nt, Homo sapiens
uauucuacaguguucuu

SEQ ID NO: 4389 - RNA, 17 nt, Homo sapiens
caguguucuuacuauug

SEQ ID NO: 4390 - RNA, 17 nt, Homo sapiens
guucuuacuauugacaa

SEQ ID NO: 4391 - RNA, 17 nt, Homo sapiens
cuauugacaaaaugcag

SEQ ID NO: 4392 - RNA, 17 nt, Homo sapiens
caaaaugcagaacaaag

SEQ ID NO: 4393 - RNA, 17 nt, Homo sapiens
ugcagaacaaagacaaa

SEQ ID NO: 4394 - RNA, 17 nt, Homo sapiens
acaaagacaaaggacuu

SEQ ID NO: 4395 - RNA, 17 nt, Homo sapiens
caaaggacuuuauacuu

SEQ ID NO: 4396 - RNA, 17 nt, Homo sapiens
cuuuauacuugucgugu

SEQ ID NO: 4397 - RNA, 17 nt, Homo sapiens
gaguggaccaucauuca

SEQ ID NO: 4398 - RNA, 17 nt, Homo sapiens
aguggaccaucauucaa

SEQ ID NO: 4399 - RNA, 17 nt, Homo sapiens
ggaccaucauucaaauc

SEQ ID NO: 4400 - RNA, 17 nt, Homo sapiens
caucauucaaaucuguu

SEQ ID NO: 4401 - RNA, 17 nt, Homo sapiens
uucaaaucuguuaacac

SEQ ID NO: 4402 - RNA, 17 nt, Homo sapiens
cuguuaacaccucagug

SEQ ID NO: 4403 - RNA, 17 nt, Homo sapiens
guuaacaccucagugca

SEQ ID NO: 4404 - RNA, 17 nt, Homo sapiens
uuaacaccucagugcau

SEQ ID NO: 4405 - RNA, 17 nt, Homo sapiens
aacaccucagugcauau

SEQ ID NO: 4406 - RNA, 17 nt, Homo sapiens
cucagugcauauauaug

SEQ ID NO: 4407 - RNA, 17 nt, Homo sapiens
gauaaagcauucaucac

SEQ ID NO: 4408 - RNA, 17 nt, Homo sapiens
aagcauucaucacugug

SEQ ID NO: 4409 - RNA, 17 nt, Homo sapiens
cauucaucacugugaaa

SEQ ID NO: 4410 - RNA, 17 nt, Homo sapiens
uucaucacugugaaaca

SEQ ID NO: 4411 - RNA, 17 nt, Homo sapiens
ugugaaacaucgaaaac

SEQ ID NO: 4412 - RNA, 17 nt, Homo sapiens
ucgaaaacagcaggugc

SEQ ID NO: 4413 - RNA, 17 nt, Homo sapiens
aaaacagcaggugcuug

SEQ ID NO: 4414 - RNA, 17 nt, Homo sapiens
gcaggugcuugaaaccg

SEQ ID NO: 4415 - RNA, 17 nt, Homo sapiens
cuugaaaccguagcugg

SEQ ID NO: 4416 - RNA, 17 nt, Homo sapiens
accguagcuggcaagcg

SEQ ID NO: 4417 - RNA, 17 nt, Homo sapiens
uagcuggcaagcggucu

SEQ ID NO: 4418 - RNA, 17 nt, Homo sapiens
aagcggucuuaccggcu

SEQ ID NO: 4419 - RNA, 17 nt, Homo sapiens
ggucuuaccggcucucu

SEQ ID NO: 4420 - RNA, 17 nt, Homo sapiens
uuaccggcucucuauga

SEQ ID NO: 4421 - RNA, 17 nt, Homo sapiens
accggcucucuaugaaa

SEQ ID NO: 4422 - RNA, 17 nt, Homo sapiens
cggcucucuaugaaagu

SEQ ID NO: 4423 - RNA, 17 nt, Homo sapiens
gugaaggcauuucccuc

SEQ ID NO: 4424 - RNA, 17 nt, Homo sapiens
ggcauuucccucgccgg

SEQ ID NO: 4425 - RNA, 17 nt, Homo sapiens
gcauuucccucgccgga

SEQ ID NO: 4426 - RNA, 17 nt, Homo sapiens
cauuucccucgccggaa

SEQ ID NO: 4427 - RNA, 17 nt, Homo sapiens
ucccucgccggaaguug

SEQ ID NO: 4428 - RNA, 17 nt, Homo sapiens
uggguuaccugcgacug

SEQ ID NO: 4429 - RNA, 17 nt, Homo sapiens
ggguuaccugcgacuga

SEQ ID NO: 4430 - RNA, 17 nt, Homo sapiens
ccugcgacugagaaauc

SEQ ID NO: 4431 - RNA, 17 nt, Homo sapiens
gagaaaucugcucgcua

SEQ ID NO: 4432 - RNA, 17 nt, Homo sapiens
aaaucugcucgcuauuu

SEQ ID NO: 4433 - RNA, 17 nt, Homo sapiens
cugcucgcuauuugacu

SEQ ID NO: 4434 - RNA, 17 nt, Homo sapiens
uauuugacucguggcua

SEQ ID NO: 4435 - RNA, 17 nt, Homo sapiens
cucguggcuacucguua

SEQ ID NO: 4436 - RNA, 17 nt, Homo sapiens
guggcuacucguuaauu

SEQ ID NO: 4437 - RNA, 17 nt, Homo sapiens
uaauuaucaaggacgua

SEQ ID NO: 4438 - RNA, 17 nt, Homo sapiens
gacguaacugaagagga

SEQ ID NO: 4439 - RNA, 17 nt, Homo sapiens
gaggaugcagggaauua

SEQ ID NO: 4440 - RNA, 17 nt, Homo sapiens
aauuauacaaucuugcu

SEQ ID NO: 4441 - RNA, 17 nt, Homo sapiens
auacaaucuugcugagc

SEQ ID NO: 4442 - RNA, 17 nt, Homo sapiens
aaucuugcugagcauaa

SEQ ID NO: 4443 - RNA, 17 nt, Homo sapiens
ugcugagcauaaaacag

SEQ ID NO: 4444 - RNA, 17 nt, Homo sapiens
cauaaaacagucaaaug

SEQ ID NO: 4445 - RNA, 17 nt, Homo sapiens
aaacagucaaauguguu

SEQ ID NO: 4446 - RNA, 17 nt, Homo sapiens
uuaaaaaccucacugcc

SEQ ID NO: 4447 - RNA, 17 nt, Homo sapiens
uaaaaaccucacugcca

SEQ ID NO: 4448 - RNA, 17 nt, Homo sapiens
aaaaccucacugccacu

SEQ ID NO: 4449 - RNA, 17 nt, Homo sapiens
aaccucacugccacucu

SEQ ID NO: 4450 - RNA, 17 nt, Homo sapiens
cucacugccacucuaau

SEQ ID NO: 4451 - RNA, 17 nt, Homo sapiens
ucacugccacucuaauu

SEQ ID NO: 4452 - RNA, 17 nt, Homo sapiens
acugccacucuaauugu

SEQ ID NO: 4453 - RNA, 17 nt, Homo sapiens
ugccacucuaauuguca

SEQ ID NO: 4454 - RNA, 17 nt, Homo sapiens
uaauugucaaugugaaa

SEQ ID NO: 4455 - RNA, 17 nt, Homo sapiens
ugugaaaccccagauuu

SEQ ID NO: 4456 - RNA, 17 nt, Homo sapiens
gugaaaccccagauuua

SEQ ID NO: 4457 - RNA, 17 nt, Homo sapiens
ugaaaccccagauuuac

SEQ ID NO: 4458 - RNA, 17 nt, Homo sapiens
gaaaccccagauuuacg

SEQ ID NO: 4459 - RNA, 17 nt, Homo sapiens
gaaaaggccgugucauc

SEQ ID NO: 4460 - RNA, 17 nt, Homo sapiens
gccgugucaucguuucc

SEQ ID NO: 4461 - RNA, 17 nt, Homo sapiens
aucguuuccagacccgg

SEQ ID NO: 4462 - RNA, 17 nt, Homo sapiens
ucguuuccagacccggc

SEQ ID NO: 4463 - RNA, 17 nt, Homo sapiens
uuccagacccggcucuc

SEQ ID NO: 4464 - RNA, 17 nt, Homo sapiens
uccagacccggcucucu

SEQ ID NO: 4465 - RNA, 17 nt, Homo sapiens
gacccggcucucuaccc

SEQ ID NO: 4466 - RNA, 17 nt, Homo sapiens
cccggcucucuacccac

SEQ ID NO: 4467 - RNA, 17 nt, Homo sapiens
cggcucucuacccacug

SEQ ID NO: 4468 - RNA, 17 nt, Homo sapiens
cucucuacccacugggc

SEQ ID NO: 4469 - RNA, 17 nt, Homo sapiens
ucucuacccacugggca

SEQ ID NO: 4470 - RNA, 17 nt, Homo sapiens
cucuacccacugggcag

SEQ ID NO: 4471 - RNA, 17 nt, Homo sapiens
cuacccacugggcagca

SEQ ID NO: 4472 - RNA, 17 nt, Homo sapiens
cacugggcagcagacaa

SEQ ID NO: 4473 - RNA, 17 nt, Homo sapiens
ugggcagcagacaaauc

SEQ ID NO: 4474 - RNA, 17 nt, Homo sapiens
cagcagacaaauccuga

SEQ ID NO: 4475 - RNA, 17 nt, Homo sapiens
gacaaauccugacuugu

SEQ ID NO: 4476 - RNA, 17 nt, Homo sapiens
acaaauccugacuugua

SEQ ID NO: 4477 - RNA, 17 nt, Homo sapiens
auccugacuuguaccgc

SEQ ID NO: 4478 - RNA, 17 nt, Homo sapiens
acuuguaccgcauaugg

SEQ ID NO: 4479 - RNA, 17 nt, Homo sapiens
uguaccgcauaugguau

SEQ ID NO: 4480 - RNA, 17 nt, Homo sapiens
augguaucccucaaccu

SEQ ID NO: 4481 - RNA, 17 nt, Homo sapiens
ugguaucccucaaccua

SEQ ID NO: 4482 - RNA, 17 nt, Homo sapiens
gguaucccucaaccuac

SEQ ID NO: 4483 - RNA, 17 nt, Homo sapiens
uaucccucaaccuacaa

SEQ ID NO: 4484 - RNA, 17 nt, Homo sapiens
cccucaaccuacaauca

SEQ ID NO: 4485 - RNA, 17 nt, Homo sapiens
ccucaaccuacaaucaa

SEQ ID NO: 4486 - RNA, 17 nt, Homo sapiens
caaccuacaaucaagug

SEQ ID NO: 4487 - RNA, 17 nt, Homo sapiens
cuacaaucaagugguuc

SEQ ID NO: 4488 - RNA, 17 nt, Homo sapiens
agugguucuggcacccc

SEQ ID NO: 4489 - RNA, 17 nt, Homo sapiens
guucuggcaccccugua

SEQ ID NO: 4490 - RNA, 17 nt, Homo sapiens
ucuggcaccccuguaac

SEQ ID NO: 4491 - RNA, 17 nt, Homo sapiens
cuggcaccccuguaacc

SEQ ID NO: 4492 - RNA, 17 nt, Homo sapiens
uggcaccccuguaacca

SEQ ID NO: 4493 - RNA, 17 nt, Homo sapiens
ggcaccccuguaaccau

SEQ ID NO: 4494 - RNA, 17 nt, Homo sapiens
ccuguaaccauaaucau

SEQ ID NO: 4495 - RNA, 17 nt, Homo sapiens
cuguaaccauaaucauu

SEQ ID NO: 4496 - RNA, 17 nt, Homo sapiens
ccauaaucauuccgaag

SEQ ID NO: 4497 - RNA, 17 nt, Homo sapiens
aaucauuccgaagcaag

SEQ ID NO: 4498 - RNA, 17 nt, Homo sapiens
uccgaagcaagguguga

SEQ ID NO: 4499 - RNA, 17 nt, Homo sapiens
ggugugacuuuuguucc

SEQ ID NO: 4500 - RNA, 17 nt, Homo sapiens
uuuuguuccaauaauga

SEQ ID NO: 4501 - RNA, 17 nt, Homo sapiens
uuuguuccaauaaugaa

SEQ ID NO: 4502 - RNA, 17 nt, Homo sapiens
gaagaguccuuuauccu

SEQ ID NO: 4503 - RNA, 17 nt, Homo sapiens
aagaguccuuuauccug

SEQ ID NO: 4504 - RNA, 17 nt, Homo sapiens
ccuuuauccuggaugcu

SEQ ID NO: 4505 - RNA, 17 nt, Homo sapiens
cuuuauccuggaugcug

SEQ ID NO: 4506 - RNA, 17 nt, Homo sapiens
cuggaugcugacagcaa

SEQ ID NO: 4507 - RNA, 17 nt, Homo sapiens
augcugacagcaacaug

SEQ ID NO: 4508 - RNA, 17 nt, Homo sapiens
cugacagcaacauggga

SEQ ID NO: 4509 - RNA, 17 nt, Homo sapiens
acagcaacaugggaaac

SEQ ID NO: 4510 - RNA, 17 nt, Homo sapiens
ugggaaacagaauugag

SEQ ID NO: 4511 - RNA, 17 nt, Homo sapiens
uugagagcaucacucag

SEQ ID NO: 4512 - RNA, 17 nt, Homo sapiens
agagcaucacucagcgc

SEQ ID NO: 4513 - RNA, 17 nt, Homo sapiens
agcaucacucagcgcau

SEQ ID NO: 4514 - RNA, 17 nt, Homo sapiens
caucacucagcgcaugg

SEQ ID NO: 4515 - RNA, 17 nt, Homo sapiens
cucagcgcauggcaaua

SEQ ID NO: 4516 - RNA, 17 nt, Homo sapiens
cgcauggcaauaauaga

SEQ ID NO: 4517 - RNA, 17 nt, Homo sapiens
aagauggcuagcaccuu

SEQ ID NO: 4518 - RNA, 17 nt, Homo sapiens
uggcuagcaccuugguu

SEQ ID NO: 4519 - RNA, 17 nt, Homo sapiens
gcuagcaccuugguugu

SEQ ID NO: 4520 - RNA, 17 nt, Homo sapiens
cuagcaccuugguugug

SEQ ID NO: 4521 - RNA, 17 nt, Homo sapiens
guuguggcugacucuag

SEQ ID NO: 4522 - RNA, 17 nt, Homo sapiens
uggcugacucuagaauu

SEQ ID NO: 4523 - RNA, 17 nt, Homo sapiens
gcugacucuagaauuuc

SEQ ID NO: 4524 - RNA, 17 nt, Homo sapiens
agaauuucuggaaucua

SEQ ID NO: 4525 - RNA, 17 nt, Homo sapiens
cuggaaucuacauuugc

SEQ ID NO: 4526 - RNA, 17 nt, Homo sapiens
gaaucuacauuugcaua

SEQ ID NO: 4527 - RNA, 17 nt, Homo sapiens
acauuugcauagcuucc

SEQ ID NO: 4528 - RNA, 17 nt, Homo sapiens
ugcauagcuuccaauaa

SEQ ID NO: 4529 - RNA, 17 nt, Homo sapiens
auagcuuccaauaaagu

SEQ ID NO: 4530 - RNA, 17 nt, Homo sapiens
uagcuuccaauaaaguu

SEQ ID NO: 4531 - RNA, 17 nt, Homo sapiens
guugggacugugggaag

SEQ ID NO: 4532 - RNA, 17 nt, Homo sapiens
gaagaaacauaagcuuu

SEQ ID NO: 4533 - RNA, 17 nt, Homo sapiens
acauaagcuuuuauauc

SEQ ID NO: 4534 - RNA, 17 nt, Homo sapiens
uuuauaucacagaugug

SEQ ID NO: 4535 - RNA, 17 nt, Homo sapiens
uauaucacagaugugcc

SEQ ID NO: 4536 - RNA, 17 nt, Homo sapiens
agaugugccaaaugggu

SEQ ID NO: 4537 - RNA, 17 nt, Homo sapiens
gaugugccaaauggguu

SEQ ID NO: 4538 - RNA, 17 nt, Homo sapiens
uggguuucauguuaacu

SEQ ID NO: 4539 - RNA, 17 nt, Homo sapiens
auguuaacuuggaaaaa

SEQ ID NO: 4540 - RNA, 17 nt, Homo sapiens
aaaaaugccgacggaag

SEQ ID NO: 4541 - RNA, 17 nt, Homo sapiens
gagaggaccugaaacug

SEQ ID NO: 4542 - RNA, 17 nt, Homo sapiens
agaggaccugaaacugu

SEQ ID NO: 4543 - RNA, 17 nt, Homo sapiens
ccugaaacugucuugca

SEQ ID NO: 4544 - RNA, 17 nt, Homo sapiens
aaacugucuugcacagu

SEQ ID NO: 4545 - RNA, 17 nt, Homo sapiens
ugucuugcacaguuaac

SEQ ID NO: 4546 - RNA, 17 nt, Homo sapiens
ucuugcacaguuaacaa

SEQ ID NO: 4547 - RNA, 17 nt, Homo sapiens
caguuaacaaguucuua

SEQ ID NO: 4548 - RNA, 17 nt, Homo sapiens
acaaguucuuauacaga

SEQ ID NO: 4549 - RNA, 17 nt, Homo sapiens
ucuuauacagagacguu

SEQ ID NO: 4550 - RNA, 17 nt, Homo sapiens
gacguuacuuggauuuu

SEQ ID NO: 4551 - RNA, 17 nt, Homo sapiens
gauuuuacugcggacag

SEQ ID NO: 4552 - RNA, 17 nt, Homo sapiens
cugcggacaguuaauaa

SEQ ID NO: 4553 - RNA, 17 nt, Homo sapiens
uuaauaacagaacaaug

SEQ ID NO: 4554 - RNA, 17 nt, Homo sapiens
aacagaacaaugcacua

SEQ ID NO: 4555 - RNA, 17 nt, Homo sapiens
aacaaugcacuacagua

SEQ ID NO: 4556 - RNA, 17 nt, Homo sapiens
caaugcacuacaguauu

SEQ ID NO: 4557 - RNA, 17 nt, Homo sapiens
ugcacuacaguauuagc

SEQ ID NO: 4558 - RNA, 17 nt, Homo sapiens
guauuagcaagcaaaaa

SEQ ID NO: 4559 - RNA, 17 nt, Homo sapiens
uagcaagcaaaaaaugg

SEQ ID NO: 4560 - RNA, 17 nt, Homo sapiens
aaaauggccaucacuaa

SEQ ID NO: 4561 - RNA, 17 nt, Homo sapiens
aaauggccaucacuaag

SEQ ID NO: 4562 - RNA, 17 nt, Homo sapiens
uggccaucacuaaggag

SEQ ID NO: 4563 - RNA, 17 nt, Homo sapiens
gccaucacuaaggagca

SEQ ID NO: 4564 - RNA, 17 nt, Homo sapiens
uaaggagcacuccauca

SEQ ID NO: 4565 - RNA, 17 nt, Homo sapiens
aggagcacuccaucacu

SEQ ID NO: 4566 - RNA, 17 nt, Homo sapiens
gagcacuccaucacucu

SEQ ID NO: 4567 - RNA, 17 nt, Homo sapiens
agcacuccaucacucuu

SEQ ID NO: 4568 - RNA, 17 nt, Homo sapiens
acuccaucacucuuaau

SEQ ID NO: 4569 - RNA, 17 nt, Homo sapiens
uccaucacucuuaaucu

SEQ ID NO: 4570 - RNA, 17 nt, Homo sapiens
caucacucuuaaucuua

SEQ ID NO: 4571 - RNA, 17 nt, Homo sapiens
ucuuaaucuuaccauca

SEQ ID NO: 4572 - RNA, 17 nt, Homo sapiens
aaucuuaccaucaugaa

SEQ ID NO: 4573 - RNA, 17 nt, Homo sapiens
aucuuaccaucaugaau

SEQ ID NO: 4574 - RNA, 17 nt, Homo sapiens
uuaccaucaugaauguu

SEQ ID NO: 4575 - RNA, 17 nt, Homo sapiens
aauguuucccugcaaga

SEQ ID NO: 4576 - RNA, 17 nt, Homo sapiens
auguuucccugcaagau

SEQ ID NO: 4577 - RNA, 17 nt, Homo sapiens
uguuucccugcaagauu

SEQ ID NO: 4578 - RNA, 17 nt, Homo sapiens
uucccugcaagauucag

SEQ ID NO: 4579 - RNA, 17 nt, Homo sapiens
caagauucaggcaccua

SEQ ID NO: 4580 - RNA, 17 nt, Homo sapiens
auucaggcaccuaugcc

SEQ ID NO: 4581 - RNA, 17 nt, Homo sapiens
ucaggcaccuaugccug

SEQ ID NO: 4582 - RNA, 17 nt, Homo sapiens
caggcaccuaugccugc

SEQ ID NO: 4583 - RNA, 17 nt, Homo sapiens
accuaugccugcagagc

SEQ ID NO: 4584 - RNA, 17 nt, Homo sapiens
ccuaugccugcagagcc

SEQ ID NO: 4585 - RNA, 17 nt, Homo sapiens
augccugcagagccagg

SEQ ID NO: 4586 - RNA, 17 nt, Homo sapiens
ugcagagccaggaaugu

SEQ ID NO: 4587 - RNA, 17 nt, Homo sapiens
gcagagccaggaaugua

SEQ ID NO: 4588 - RNA, 17 nt, Homo sapiens
auguauacacaggggaa

SEQ ID NO: 4589 - RNA, 17 nt, Homo sapiens
guauacacaggggaaga

SEQ ID NO: 4590 - RNA, 17 nt, Homo sapiens
aagaaauccuccagaag

SEQ ID NO: 4591 - RNA, 17 nt, Homo sapiens
agaaauccuccagaaga

SEQ ID NO: 4592 - RNA, 17 nt, Homo sapiens
aaauccuccagaagaaa

SEQ ID NO: 4593 - RNA, 17 nt, Homo sapiens
aauccuccagaagaaag

SEQ ID NO: 4594 - RNA, 17 nt, Homo sapiens
gaaauuacaaucagaga

SEQ ID NO: 4595 - RNA, 17 nt, Homo sapiens
uuacaaucagagaucag

SEQ ID NO: 4596 - RNA, 17 nt, Homo sapiens
cagagaucaggaagcac

SEQ ID NO: 4597 - RNA, 17 nt, Homo sapiens
caggaagcaccauaccu

SEQ ID NO: 4598 - RNA, 17 nt, Homo sapiens
ggaagcaccauaccucc

SEQ ID NO: 4599 - RNA, 17 nt, Homo sapiens
gaagcaccauaccuccu

SEQ ID NO: 4600 - RNA, 17 nt, Homo sapiens
caccauaccuccugcga

SEQ ID NO: 4601 - RNA, 17 nt, Homo sapiens
accauaccuccugcgaa

SEQ ID NO: 4602 - RNA, 17 nt, Homo sapiens
cauaccuccugcgaaac

SEQ ID NO: 4603 - RNA, 17 nt, Homo sapiens
auaccuccugcgaaacc

SEQ ID NO: 4604 - RNA, 17 nt, Homo sapiens
ugcgaaaccucagugau

SEQ ID NO: 4605 - RNA, 17 nt, Homo sapiens
gcgaaaccucagugauc

SEQ ID NO: 4606 - RNA, 17 nt, Homo sapiens
gaaaccucagugaucac

SEQ ID NO: 4607 - RNA, 17 nt, Homo sapiens
cagugaucacacagugg

SEQ ID NO: 4608 - RNA, 17 nt, Homo sapiens
gugaucacacaguggcc

SEQ ID NO: 4609 - RNA, 17 nt, Homo sapiens
gaucacacaguggccau

SEQ ID NO: 4610 - RNA, 17 nt, Homo sapiens
acaguggccaucagcag

SEQ ID NO: 4611 - RNA, 17 nt, Homo sapiens
caguggccaucagcagu

SEQ ID NO: 4612 - RNA, 17 nt, Homo sapiens
uggccaucagcaguucc

SEQ ID NO: 4613 - RNA, 17 nt, Homo sapiens
ccaucagcaguuccacc

SEQ ID NO: 4614 - RNA, 17 nt, Homo sapiens
agcaguuccaccacuuu

SEQ ID NO: 4615 - RNA, 17 nt, Homo sapiens
gcaguuccaccacuuua

SEQ ID NO: 4616 - RNA, 17 nt, Homo sapiens
aguuccaccacuuuaga

SEQ ID NO: 4617 - RNA, 17 nt, Homo sapiens
guuccaccacuuuagac

SEQ ID NO: 4618 - RNA, 17 nt, Homo sapiens
uccaccacuuuagacug

SEQ ID NO: 4619 - RNA, 17 nt, Homo sapiens
cuuuagacugucaugcu

SEQ ID NO: 4620 - RNA, 17 nt, Homo sapiens
agacugucaugcuaaug

SEQ ID NO: 4621 - RNA, 17 nt, Homo sapiens
ugucaugcuaauggugu

SEQ ID NO: 4622 - RNA, 17 nt, Homo sapiens
augguguccccgagccu

SEQ ID NO: 4623 - RNA, 17 nt, Homo sapiens
ugguguccccgagccuc

SEQ ID NO: 4624 - RNA, 17 nt, Homo sapiens
gguguccccgagccuca

SEQ ID NO: 4625 - RNA, 17 nt, Homo sapiens
ccccgagccucagauca

SEQ ID NO: 4626 - RNA, 17 nt, Homo sapiens
cccgagccucagaucac

SEQ ID NO: 4627 - RNA, 17 nt, Homo sapiens
cgagccucagaucacuu

SEQ ID NO: 4628 - RNA, 17 nt, Homo sapiens
cucagaucacuugguuu

SEQ ID NO: 4629 - RNA, 17 nt, Homo sapiens
cagaucacuugguuuaa

SEQ ID NO: 4630 - RNA, 17 nt, Homo sapiens
uuaaaaacaaccacaaa

SEQ ID NO: 4631 - RNA, 17 nt, Homo sapiens
aaaacaaccacaaaaua

SEQ ID NO: 4632 - RNA, 17 nt, Homo sapiens
aaacaaccacaaaauac

SEQ ID NO: 4633 - RNA, 17 nt, Homo sapiens
acaaccacaaaauacaa

SEQ ID NO: 4634 - RNA, 17 nt, Homo sapiens
caaaauacaacaagagc

SEQ ID NO: 4635 - RNA, 17 nt, Homo sapiens
aauacaacaagagccug

SEQ ID NO: 4636 - RNA, 17 nt, Homo sapiens
acaagagccuggaauua

SEQ ID NO: 4637 - RNA, 17 nt, Homo sapiens
caagagccuggaauuau

SEQ ID NO: 4638 - RNA, 17 nt, Homo sapiens
uuuaggaccaggaagca

SEQ ID NO: 4639 - RNA, 17 nt, Homo sapiens
uuaggaccaggaagcag

SEQ ID NO: 4640 - RNA, 17 nt, Homo sapiens
caggaagcagcacgcug

SEQ ID NO: 4641 - RNA, 17 nt, Homo sapiens
gaagcagcacgcuguuu

SEQ ID NO: 4642 - RNA, 17 nt, Homo sapiens
cagcacgcuguuuauug

SEQ ID NO: 4643 - RNA, 17 nt, Homo sapiens
aaagagucacagaagag

SEQ ID NO: 4644 - RNA, 17 nt, Homo sapiens
agagucacagaagagga

SEQ ID NO: 4645 - RNA, 17 nt, Homo sapiens
aaggugucuaucacugc

SEQ ID NO: 4646 - RNA, 17 nt, Homo sapiens
ugucuaucacugcaaag

SEQ ID NO: 4647 - RNA, 17 nt, Homo sapiens
ucuaucacugcaaagcc

SEQ ID NO: 4648 - RNA, 17 nt, Homo sapiens
aucacugcaaagccacc

SEQ ID NO: 4649 - RNA, 17 nt, Homo sapiens
ugcaaagccaccaacca

SEQ ID NO: 4650 - RNA, 17 nt, Homo sapiens
gcaaagccaccaaccag

SEQ ID NO: 4651 - RNA, 17 nt, Homo sapiens
aaagccaccaaccagaa

SEQ ID NO: 4652 - RNA, 17 nt, Homo sapiens
aagccaccaaccagaag

SEQ ID NO: 4653 - RNA, 17 nt, Homo sapiens
ccaccaaccagaagggc

SEQ ID NO: 4654 - RNA, 17 nt, Homo sapiens
caccaaccagaagggcu

SEQ ID NO: 4655 - RNA, 17 nt, Homo sapiens
agaagggcucuguggaa

SEQ ID NO: 4656 - RNA, 17 nt, Homo sapiens
aagggcucuguggaaag

SEQ ID NO: 4657 - RNA, 17 nt, Homo sapiens
gaaaguucagcauaccu

SEQ ID NO: 4658 - RNA, 17 nt, Homo sapiens
aguucagcauaccucac

SEQ ID NO: 4659 - RNA, 17 nt, Homo sapiens
cagcauaccucacuguu

SEQ ID NO: 4660 - RNA, 17 nt, Homo sapiens
agcauaccucacuguuc

SEQ ID NO: 4661 - RNA, 17 nt, Homo sapiens
cauaccucacuguucaa

SEQ ID NO: 4662 - RNA, 17 nt, Homo sapiens
uaccucacuguucaagg

SEQ ID NO: 4663 - RNA, 17 nt, Homo sapiens
cacuguucaaggaaccu

SEQ ID NO: 4664 - RNA, 17 nt, Homo sapiens
caaggaaccucggacaa

SEQ ID NO: 4665 - RNA, 17 nt, Homo sapiens
aaggaaccucggacaag

SEQ ID NO: 4666 - RNA, 17 nt, Homo sapiens
ccucggacaagucuaau

SEQ ID NO: 4667 - RNA, 17 nt, Homo sapiens
gacaagucuaaucugga

SEQ ID NO: 4668 - RNA, 17 nt, Homo sapiens
gucuaaucuggagcuga

SEQ ID NO: 4669 - RNA, 17 nt, Homo sapiens
ucuggagcugaucacuc

SEQ ID NO: 4670 - RNA, 17 nt, Homo sapiens
agcugaucacucuaaca

SEQ ID NO: 4671 - RNA, 17 nt, Homo sapiens
cugaucacucuaacaug

SEQ ID NO: 4672 - RNA, 17 nt, Homo sapiens
gaucacucuaacaugca

SEQ ID NO: 4673 - RNA, 17 nt, Homo sapiens
acucuaacaugcaccug

SEQ ID NO: 4674 - RNA, 17 nt, Homo sapiens
uaacaugcaccugugug

SEQ ID NO: 4675 - RNA, 17 nt, Homo sapiens
acaugcaccuguguggc

SEQ ID NO: 4676 - RNA, 17 nt, Homo sapiens
caugcaccuguguggcu

SEQ ID NO: 4677 - RNA, 17 nt, Homo sapiens
uguguggcugcgacucu

SEQ ID NO: 4678 - RNA, 17 nt, Homo sapiens
gcugcgacucucuucug

SEQ ID NO: 4679 - RNA, 17 nt, Homo sapiens
ugcgacucucuucuggc

SEQ ID NO: 4680 - RNA, 17 nt, Homo sapiens
cgacucucuucuggcuc

SEQ ID NO: 4681 - RNA, 17 nt, Homo sapiens
cucucuucuggcuccua

SEQ ID NO: 4682 - RNA, 17 nt, Homo sapiens
cuucuggcuccuauuaa

SEQ ID NO: 4683 - RNA, 17 nt, Homo sapiens
ucuggcuccuauuaacc

SEQ ID NO: 4684 - RNA, 17 nt, Homo sapiens
cuggcuccuauuaaccc

SEQ ID NO: 4685 - RNA, 17 nt, Homo sapiens
cuauuaacccuccuuau

SEQ ID NO: 4686 - RNA, 17 nt, Homo sapiens
uauuaacccuccuuauc

SEQ ID NO: 4687 - RNA, 17 nt, Homo sapiens
auuaacccuccuuaucc

SEQ ID NO: 4688 - RNA, 17 nt, Homo sapiens
uaacccuccuuauccga

SEQ ID NO: 4689 - RNA, 17 nt, Homo sapiens
aacccuccuuauccgaa

SEQ ID NO: 4690 - RNA, 17 nt, Homo sapiens
uccuuauccgaaaaaug

SEQ ID NO: 4691 - RNA, 17 nt, Homo sapiens
aaaaggucuucuucuga

SEQ ID NO: 4692 - RNA, 17 nt, Homo sapiens
aggucuucuucugaaau

SEQ ID NO: 4693 - RNA, 17 nt, Homo sapiens
ucuucuucugaaauaaa

SEQ ID NO: 4694 - RNA, 17 nt, Homo sapiens
auaaagacugacuaccu

SEQ ID NO: 4695 - RNA, 17 nt, Homo sapiens
agacugacuaccuauca

SEQ ID NO: 4696 - RNA, 17 nt, Homo sapiens
cugacuaccuaucaauu

SEQ ID NO: 4697 - RNA, 17 nt, Homo sapiens
ugacuaccuaucaauua

SEQ ID NO: 4698 - RNA, 17 nt, Homo sapiens
uaccuaucaauuauaau

SEQ ID NO: 4699 - RNA, 17 nt, Homo sapiens
uaauggacccagaugaa

SEQ ID NO: 4700 - RNA, 17 nt, Homo sapiens
aauggacccagaugaag

SEQ ID NO: 4701 - RNA, 17 nt, Homo sapiens
auggacccagaugaagu

SEQ ID NO: 4702 - RNA, 17 nt, Homo sapiens
ugaaguuccuuuggaug

SEQ ID NO: 4703 - RNA, 17 nt, Homo sapiens
gaaguuccuuuggauga

SEQ ID NO: 4704 - RNA, 17 nt, Homo sapiens
ggaugagcagugugagc

SEQ ID NO: 4705 - RNA, 17 nt, Homo sapiens
ugagcggcucccuuaug

SEQ ID NO: 4706 - RNA, 17 nt, Homo sapiens
agcggcucccuuaugau

SEQ ID NO: 4707 - RNA, 17 nt, Homo sapiens
gcggcucccuuaugaug

SEQ ID NO: 4708 - RNA, 17 nt, Homo sapiens
cggcucccuuaugaugc

SEQ ID NO: 4709 - RNA, 17 nt, Homo sapiens
uaugaugccagcaagug

SEQ ID NO: 4710 - RNA, 17 nt, Homo sapiens
augaugccagcaagugg

SEQ ID NO: 4711 - RNA, 17 nt, Homo sapiens
augccagcaagugggag

SEQ ID NO: 4712 - RNA, 17 nt, Homo sapiens
gaguuugcccgggagag

SEQ ID NO: 4713 - RNA, 17 nt, Homo sapiens
aguuugcccgggagaga

SEQ ID NO: 4714 - RNA, 17 nt, Homo sapiens
ggagagacuuaaacugg

SEQ ID NO: 4715 - RNA, 17 nt, Homo sapiens
acuuaaacugggcaaau

SEQ ID NO: 4716 - RNA, 17 nt, Homo sapiens
aacugggcaaaucacuu

SEQ ID NO: 4717 - RNA, 17 nt, Homo sapiens
ggcaaaucacuuggaag

SEQ ID NO: 4718 - RNA, 17 nt, Homo sapiens
caaaucacuuggaagag

SEQ ID NO: 4719 - RNA, 17 nt, Homo sapiens
agaggggcuuuuggaaa

SEQ ID NO: 4720 - RNA, 17 nt, Homo sapiens
agugguucaagcaucag

SEQ ID NO: 4721 - RNA, 17 nt, Homo sapiens
guucaagcaucagcauu

SEQ ID NO: 4722 - RNA, 17 nt, Homo sapiens
caagcaucagcauuugg

SEQ ID NO: 4723 - RNA, 17 nt, Homo sapiens
gcaucagcauuuggcau

SEQ ID NO: 4724 - RNA, 17 nt, Homo sapiens
cauuuggcauuaagaaa

SEQ ID NO: 4725 - RNA, 17 nt, Homo sapiens
aagaaaucaccuacgug

SEQ ID NO: 4726 - RNA, 17 nt, Homo sapiens
gaaaucaccuacgugcc

SEQ ID NO: 4727 - RNA, 17 nt, Homo sapiens
aaaucaccuacgugccg

SEQ ID NO: 4728 - RNA, 17 nt, Homo sapiens
cuacgugccggacugug

SEQ ID NO: 4729 - RNA, 17 nt, Homo sapiens
ugccggacuguggcugu

SEQ ID NO: 4730 - RNA, 17 nt, Homo sapiens
acuguggcugugaaaau

SEQ ID NO: 4731 - RNA, 17 nt, Homo sapiens
gaaaaugcugaaagagg

SEQ ID NO: 4732 - RNA, 17 nt, Homo sapiens
gagggggccacggccag

SEQ ID NO: 4733 - RNA, 17 nt, Homo sapiens
agggggccacggccagc

SEQ ID NO: 4734 - RNA, 17 nt, Homo sapiens
gccacggccagcgagua

SEQ ID NO: 4735 - RNA, 17 nt, Homo sapiens
ccacggccagcgaguac

SEQ ID NO: 4736 - RNA, 17 nt, Homo sapiens
gcgaguacaaagcucug

SEQ ID NO: 4737 - RNA, 17 nt, Homo sapiens
uacaaagcucugaugac

SEQ ID NO: 4738 - RNA, 17 nt, Homo sapiens
caaagcucugaugacug

SEQ ID NO: 4739 - RNA, 17 nt, Homo sapiens
cugaugacugagcuaaa

SEQ ID NO: 4740 - RNA, 17 nt, Homo sapiens
gacugagcuaaaaaucu

SEQ ID NO: 4741 - RNA, 17 nt, Homo sapiens
uaaaaaucuugacccac

SEQ ID NO: 4742 - RNA, 17 nt, Homo sapiens
aucuugacccacauugg

SEQ ID NO: 4743 - RNA, 17 nt, Homo sapiens
ucuugacccacauuggc

SEQ ID NO: 4744 - RNA, 17 nt, Homo sapiens
cuugacccacauuggcc

SEQ ID NO: 4745 - RNA, 17 nt, Homo sapiens
ugacccacauuggccac

SEQ ID NO: 4746 - RNA, 17 nt, Homo sapiens
acauuggccaccaucug

SEQ ID NO: 4747 - RNA, 17 nt, Homo sapiens
cauuggccaccaucuga

SEQ ID NO: 4748 - RNA, 17 nt, Homo sapiens
uuggccaccaucugaac

SEQ ID NO: 4749 - RNA, 17 nt, Homo sapiens
uggccaccaucugaacg

SEQ ID NO: 4750 - RNA, 17 nt, Homo sapiens
ccaccaucugaacgugg

SEQ ID NO: 4751 - RNA, 17 nt, Homo sapiens
ugguuaaccugcuggga

SEQ ID NO: 4752 - RNA, 17 nt, Homo sapiens
gguuaaccugcugggag

SEQ ID NO: 4753 - RNA, 17 nt, Homo sapiens
uaaccugcugggagccu

SEQ ID NO: 4754 - RNA, 17 nt, Homo sapiens
cugggagccugcaccaa

SEQ ID NO: 4755 - RNA, 17 nt, Homo sapiens
ugggagccugcaccaag

SEQ ID NO: 4756 - RNA, 17 nt, Homo sapiens
gagccugcaccaagcaa

SEQ ID NO: 4757 - RNA, 17 nt, Homo sapiens
gccugcaccaagcaagg

SEQ ID NO: 4758 - RNA, 17 nt, Homo sapiens
ccugcaccaagcaagga

SEQ ID NO: 4759 - RNA, 17 nt, Homo sapiens
caccaagcaaggagggc

SEQ ID NO: 4760 - RNA, 17 nt, Homo sapiens
aggagggccucugaugg

SEQ ID NO: 4761 - RNA, 17 nt, Homo sapiens
ggagggccucugauggu

SEQ ID NO: 4762 - RNA, 17 nt, Homo sapiens
agggccucugaugguga

SEQ ID NO: 4763 - RNA, 17 nt, Homo sapiens
uugaauacugcaaauau

SEQ ID NO: 4764 - RNA, 17 nt, Homo sapiens
aauacugcaaauaugga

SEQ ID NO: 4765 - RNA, 17 nt, Homo sapiens
uggaaaucucuccaacu

SEQ ID NO: 4766 - RNA, 17 nt, Homo sapiens
gaaaucucuccaacuac

SEQ ID NO: 4767 - RNA, 17 nt, Homo sapiens
aaucucuccaacuaccu

SEQ ID NO: 4768 - RNA, 17 nt, Homo sapiens
aucucuccaacuaccuc

SEQ ID NO: 4769 - RNA, 17 nt, Homo sapiens
ucuccaacuaccucaag

SEQ ID NO: 4770 - RNA, 17 nt, Homo sapiens
ccaacuaccucaagagc

SEQ ID NO: 4771 - RNA, 17 nt, Homo sapiens
caacuaccucaagagca

SEQ ID NO: 4772 - RNA, 17 nt, Homo sapiens
acuaccucaagagcaaa

SEQ ID NO: 4773 - RNA, 17 nt, Homo sapiens
ucaagagcaaacgugac

SEQ ID NO: 4774 - RNA, 17 nt, Homo sapiens
aacgugacuuauuuuuu

SEQ ID NO: 4775 - RNA, 17 nt, Homo sapiens
auuuuuucucaacaagg

SEQ ID NO: 4776 - RNA, 17 nt, Homo sapiens
uuuuucucaacaaggau

SEQ ID NO: 4777 - RNA, 17 nt, Homo sapiens
uucucaacaaggaugca

SEQ ID NO: 4778 - RNA, 17 nt, Homo sapiens
aaggaugcagcacuaca

SEQ ID NO: 4779 - RNA, 17 nt, Homo sapiens
gaugcagcacuacacau

SEQ ID NO: 4780 - RNA, 17 nt, Homo sapiens
ugcagcacuacacaugg

SEQ ID NO: 4781 - RNA, 17 nt, Homo sapiens
agcacuacacauggagc

SEQ ID NO: 4782 - RNA, 17 nt, Homo sapiens
cacuacacauggagccu

SEQ ID NO: 4783 - RNA, 17 nt, Homo sapiens
cauggagccuaagaaag

SEQ ID NO: 4784 - RNA, 17 nt, Homo sapiens
auggagccuaagaaaga

SEQ ID NO: 4785 - RNA, 17 nt, Homo sapiens
aauggagccaggccugg

SEQ ID NO: 4786 - RNA, 17 nt, Homo sapiens
auggagccaggccugga

SEQ ID NO: 4787 - RNA, 17 nt, Homo sapiens
agccaggccuggaacaa

SEQ ID NO: 4788 - RNA, 17 nt, Homo sapiens
gccaggccuggaacaag

SEQ ID NO: 4789 - RNA, 17 nt, Homo sapiens
ccuggaacaaggcaaga

SEQ ID NO: 4790 - RNA, 17 nt, Homo sapiens
aacaaggcaagaaacca

SEQ ID NO: 4791 - RNA, 17 nt, Homo sapiens
caagaaaccaagacuag

SEQ ID NO: 4792 - RNA, 17 nt, Homo sapiens
aagaaaccaagacuaga

SEQ ID NO: 4793 - RNA, 17 nt, Homo sapiens
accaagacuagauagcg

SEQ ID NO: 4794 - RNA, 17 nt, Homo sapiens
auagcgucaccagcagc

SEQ ID NO: 4795 - RNA, 17 nt, Homo sapiens
agcgucaccagcagcga

SEQ ID NO: 4796 - RNA, 17 nt, Homo sapiens
gcgucaccagcagcgaa

SEQ ID NO: 4797 - RNA, 17 nt, Homo sapiens
ucaccagcagcgaaagc

SEQ ID NO: 4798 - RNA, 17 nt, Homo sapiens
gcgaaagcuuugcgagc

SEQ ID NO: 4799 - RNA, 17 nt, Homo sapiens
uugcgagcuccggcuuu

SEQ ID NO: 4800 - RNA, 17 nt, Homo sapiens
gcgagcuccggcuuuca

SEQ ID NO: 4801 - RNA, 17 nt, Homo sapiens
gcuccggcuuucaggaa

SEQ ID NO: 4802 - RNA, 17 nt, Homo sapiens
cggcuuucaggaagaua

SEQ ID NO: 4803 - RNA, 17 nt, Homo sapiens
uaaaagucugagugaug

SEQ ID NO: 4804 - RNA, 17 nt, Homo sapiens
gaggauucugacgguuu

SEQ ID NO: 4805 - RNA, 17 nt, Homo sapiens
acgguuucuacaaggag

SEQ ID NO: 4806 - RNA, 17 nt, Homo sapiens
guuucuacaaggagccc

SEQ ID NO: 4807 - RNA, 17 nt, Homo sapiens
caaggagcccaucacua

SEQ ID NO: 4808 - RNA, 17 nt, Homo sapiens
aaggagcccaucacuau

SEQ ID NO: 4809 - RNA, 17 nt, Homo sapiens
aggagcccaucacuaug

SEQ ID NO: 4810 - RNA, 17 nt, Homo sapiens
agcccaucacuauggaa

SEQ ID NO: 4811 - RNA, 17 nt, Homo sapiens
cccaucacuauggaaga

SEQ ID NO: 4812 - RNA, 17 nt, Homo sapiens
ggaagaucugauuucuu

SEQ ID NO: 4813 - RNA, 17 nt, Homo sapiens
cugauuucuuacaguuu

SEQ ID NO: 4814 - RNA, 17 nt, Homo sapiens
uuucuuacaguuuucaa

SEQ ID NO: 4815 - RNA, 17 nt, Homo sapiens
caguuuucaaguggcca

SEQ ID NO: 4816 - RNA, 17 nt, Homo sapiens
caaguggccagaggcau

SEQ ID NO: 4817 - RNA, 17 nt, Homo sapiens
aaguggccagaggcaug

SEQ ID NO: 4818 - RNA, 17 nt, Homo sapiens
ccagaggcauggaguuc

SEQ ID NO: 4819 - RNA, 17 nt, Homo sapiens
uggaguuccugucuucc

SEQ ID NO: 4820 - RNA, 17 nt, Homo sapiens
ggaguuccugucuucca

SEQ ID NO: 4821 - RNA, 17 nt, Homo sapiens
uuccugucuuccagaaa

SEQ ID NO: 4822 - RNA, 17 nt, Homo sapiens
cugucuuccagaaagug

SEQ ID NO: 4823 - RNA, 17 nt, Homo sapiens
ugucuuccagaaagugc

SEQ ID NO: 4824 - RNA, 17 nt, Homo sapiens
gaaagugcauucaucgg

SEQ ID NO: 4825 - RNA, 17 nt, Homo sapiens
gugcauucaucgggacc

SEQ ID NO: 4826 - RNA, 17 nt, Homo sapiens
aucgggaccuggcagcg

SEQ ID NO: 4827 - RNA, 17 nt, Homo sapiens
ucgggaccuggcagcga

SEQ ID NO: 4828 - RNA, 17 nt, Homo sapiens
gaccuggcagcgagaaa

SEQ ID NO: 4829 - RNA, 17 nt, Homo sapiens
cgagaaacauucuuuua

SEQ ID NO: 4830 - RNA, 17 nt, Homo sapiens
aaacauucuuuuaucug

SEQ ID NO: 4831 - RNA, 17 nt, Homo sapiens
cuuuuaucugagaacaa

SEQ ID NO: 4832 - RNA, 17 nt, Homo sapiens
cugagaacaacguggug

SEQ ID NO: 4833 - RNA, 17 nt, Homo sapiens
auuuuggccuugcccgg

SEQ ID NO: 4834 - RNA, 17 nt, Homo sapiens
uuuuggccuugcccggg

SEQ ID NO: 4835 - RNA, 17 nt, Homo sapiens
ggccuugcccgggauau

SEQ ID NO: 4836 - RNA, 17 nt, Homo sapiens
gccuugcccgggauauu

SEQ ID NO: 4837 - RNA, 17 nt, Homo sapiens
auaagaaccccgauuau

SEQ ID NO: 4838 - RNA, 17 nt, Homo sapiens
uaagaaccccgauuaug

SEQ ID NO: 4839 - RNA, 17 nt, Homo sapiens
aagaaccccgauuaugu

SEQ ID NO: 4840 - RNA, 17 nt, Homo sapiens
ggagauacucgacuucc

SEQ ID NO: 4841 - RNA, 17 nt, Homo sapiens
uacucgacuuccucuga

SEQ ID NO: 4842 - RNA, 17 nt, Homo sapiens
ucgacuuccucugaaau

SEQ ID NO: 4843 - RNA, 17 nt, Homo sapiens
cgacuuccucugaaaug

SEQ ID NO: 4844 - RNA, 17 nt, Homo sapiens
acuuccucugaaaugga

SEQ ID NO: 4845 - RNA, 17 nt, Homo sapiens
uggauggcucccgaauc

SEQ ID NO: 4846 - RNA, 17 nt, Homo sapiens
gauggcucccgaaucua

SEQ ID NO: 4847 - RNA, 17 nt, Homo sapiens
auggcucccgaaucuau

SEQ ID NO: 4848 - RNA, 17 nt, Homo sapiens
cccgaaucuaucuuuga

SEQ ID NO: 4849 - RNA, 17 nt, Homo sapiens
aaucuaucuuugacaaa

SEQ ID NO: 4850 - RNA, 17 nt, Homo sapiens
ucuuugacaaaaucuac

SEQ ID NO: 4851 - RNA, 17 nt, Homo sapiens
acaaaaucuacagcacc

SEQ ID NO: 4852 - RNA, 17 nt, Homo sapiens
aaaucuacagcaccaag

SEQ ID NO: 4853 - RNA, 17 nt, Homo sapiens
ucuacagcaccaagagc

SEQ ID NO: 4854 - RNA, 17 nt, Homo sapiens
uacagcaccaagagcga

SEQ ID NO: 4855 - RNA, 17 nt, Homo sapiens
acagcaccaagagcgac

SEQ ID NO: 4856 - RNA, 17 nt, Homo sapiens
guguggucuuacggagu

SEQ ID NO: 4857 - RNA, 17 nt, Homo sapiens
aguauugcugugggaaa

SEQ ID NO: 4858 - RNA, 17 nt, Homo sapiens
gggaaaucuucuccuua

SEQ ID NO: 4859 - RNA, 17 nt, Homo sapiens
aaaucuucuccuuaggu

SEQ ID NO: 4860 - RNA, 17 nt, Homo sapiens
aucuucuccuuaggugg

SEQ ID NO: 4861 - RNA, 17 nt, Homo sapiens
ucuucuccuuagguggg

SEQ ID NO: 4862 - RNA, 17 nt, Homo sapiens
ggugggucuccauaccc

SEQ ID NO: 4863 - RNA, 17 nt, Homo sapiens
ugggucuccauacccag

SEQ ID NO: 4864 - RNA, 17 nt, Homo sapiens
gggucuccauacccagg

SEQ ID NO: 4865 - RNA, 17 nt, Homo sapiens
cuccauacccaggagua

SEQ ID NO: 4866 - RNA, 17 nt, Homo sapiens
uccauacccaggaguac

SEQ ID NO: 4867 - RNA, 17 nt, Homo sapiens
ccauacccaggaguaca

SEQ ID NO: 4868 - RNA, 17 nt, Homo sapiens
aggaguacaaauggaug

SEQ ID NO: 4869 - RNA, 17 nt, Homo sapiens
augaggacuuuugcagu

SEQ ID NO: 4870 - RNA, 17 nt, Homo sapiens
acuuuugcagucgccug

SEQ ID NO: 4871 - RNA, 17 nt, Homo sapiens
gcagucgccugagggaa

SEQ ID NO: 4872 - RNA, 17 nt, Homo sapiens
cagucgccugagggaag

SEQ ID NO: 4873 - RNA, 17 nt, Homo sapiens
gggaaggcaugaggaug

SEQ ID NO: 4874 - RNA, 17 nt, Homo sapiens
augagagcuccugagua

SEQ ID NO: 4875 - RNA, 17 nt, Homo sapiens
gagagcuccugaguacu

SEQ ID NO: 4876 - RNA, 17 nt, Homo sapiens
agagcuccugaguacuc

SEQ ID NO: 4877 - RNA, 17 nt, Homo sapiens
cugaguacucuacuccu

SEQ ID NO: 4878 - RNA, 17 nt, Homo sapiens
gaguacucuacuccuga

SEQ ID NO: 4879 - RNA, 17 nt, Homo sapiens
uacucuacuccugaaau

SEQ ID NO: 4880 - RNA, 17 nt, Homo sapiens
cucuacuccugaaaucu

SEQ ID NO: 4881 - RNA, 17 nt, Homo sapiens
ucuacuccugaaaucua

SEQ ID NO: 4882 - RNA, 17 nt, Homo sapiens
cugaaaucuaucagauc

SEQ ID NO: 4883 - RNA, 17 nt, Homo sapiens
aaucuaucagaucaugc

SEQ ID NO: 4884 - RNA, 17 nt, Homo sapiens
aucagaucaugcuggac

SEQ ID NO: 4885 - RNA, 17 nt, Homo sapiens
gaucaugcuggacugcu

SEQ ID NO: 4886 - RNA, 17 nt, Homo sapiens
ugcuggacugcuggcac

SEQ ID NO: 4887 - RNA, 17 nt, Homo sapiens
uggacugcuggcacaga

SEQ ID NO: 4888 - RNA, 17 nt, Homo sapiens
cugcuggcacagagacc

SEQ ID NO: 4889 - RNA, 17 nt, Homo sapiens
gcuggcacagagaccca

SEQ ID NO: 4890 - RNA, 17 nt, Homo sapiens
acagagacccaaaagaa

SEQ ID NO: 4891 - RNA, 17 nt, Homo sapiens
cagagacccaaaagaaa

SEQ ID NO: 4892 - RNA, 17 nt, Homo sapiens
agagacccaaaagaaag

SEQ ID NO: 4893 - RNA, 17 nt, Homo sapiens
agaaaggccaagauuug

SEQ ID NO: 4894 - RNA, 17 nt, Homo sapiens
gaaaggccaagauuugc

SEQ ID NO: 4895 - RNA, 17 nt, Homo sapiens
agauuugcagaacuugu

SEQ ID NO: 4896 - RNA, 17 nt, Homo sapiens
ugcagaacuuguggaaa

SEQ ID NO: 4897 - RNA, 17 nt, Homo sapiens
ggaaaaacuaggugauu

SEQ ID NO: 4898 - RNA, 17 nt, Homo sapiens
ugauuugcuucaagcaa

SEQ ID NO: 4899 - RNA, 17 nt, Homo sapiens
uuugcuucaagcaaaug

SEQ ID NO: 4900 - RNA, 17 nt, Homo sapiens
cuucaagcaaauguaca

SEQ ID NO: 4901 - RNA, 17 nt, Homo sapiens
aaauguacaacaggaug

SEQ ID NO: 4902 - RNA, 17 nt, Homo sapiens
uguacaacaggauggua

SEQ ID NO: 4903 - RNA, 17 nt, Homo sapiens
guaaagacuacauccca

SEQ ID NO: 4904 - RNA, 17 nt, Homo sapiens
aagacuacaucccaauc

SEQ ID NO: 4905 - RNA, 17 nt, Homo sapiens
acuacaucccaaucaau

SEQ ID NO: 4906 - RNA, 17 nt, Homo sapiens
cuacaucccaaucaaug

SEQ ID NO: 4907 - RNA, 17 nt, Homo sapiens
uacaucccaaucaaugc

SEQ ID NO: 4908 - RNA, 17 nt, Homo sapiens
ucccaaucaaugccaua

SEQ ID NO: 4909 - RNA, 17 nt, Homo sapiens
aucaaugccauacugac

SEQ ID NO: 4910 - RNA, 17 nt, Homo sapiens
ucaaugccauacugaca

SEQ ID NO: 4911 - RNA, 17 nt, Homo sapiens
ugccauacugacaggaa

SEQ ID NO: 4912 - RNA, 17 nt, Homo sapiens
auacugacaggaaauag

SEQ ID NO: 4913 - RNA, 17 nt, Homo sapiens
ggguuuacauacucaac

SEQ ID NO: 4914 - RNA, 17 nt, Homo sapiens
uuacauacucaacuccu

SEQ ID NO: 4915 - RNA, 17 nt, Homo sapiens
acauacucaacuccugc

SEQ ID NO: 4916 - RNA, 17 nt, Homo sapiens
uacucaacuccugccuu

SEQ ID NO: 4917 - RNA, 17 nt, Homo sapiens
cucaacuccugccuucu

SEQ ID NO: 4918 - RNA, 17 nt, Homo sapiens
ucaacuccugccuucuc

SEQ ID NO: 4919 - RNA, 17 nt, Homo sapiens
acuccugccuucucuga

SEQ ID NO: 4920 - RNA, 17 nt, Homo sapiens
cuccugccuucucugag

SEQ ID NO: 4921 - RNA, 17 nt, Homo sapiens
cugccuucucugaggac

SEQ ID NO: 4922 - RNA, 17 nt, Homo sapiens
gccuucucugaggacuu

SEQ ID NO: 4923 - RNA, 17 nt, Homo sapiens
cugaggacuucuucaag

SEQ ID NO: 4924 - RNA, 17 nt, Homo sapiens
aggacuucuucaaggaa

SEQ ID NO: 4925 - RNA, 17 nt, Homo sapiens
acuucuucaaggaaagu

SEQ ID NO: 4926 - RNA, 17 nt, Homo sapiens
aguauuucagcuccgaa

SEQ ID NO: 4927 - RNA, 17 nt, Homo sapiens
auuucagcuccgaaguu

SEQ ID NO: 4928 - RNA, 17 nt, Homo sapiens
uucagcuccgaaguuua

SEQ ID NO: 4929 - RNA, 17 nt, Homo sapiens
uuuaauucaggaagcuc

SEQ ID NO: 4930 - RNA, 17 nt, Homo sapiens
caggaagcucugaugau

SEQ ID NO: 4931 - RNA, 17 nt, Homo sapiens
ggaagcucugaugaugu

SEQ ID NO: 4932 - RNA, 17 nt, Homo sapiens
augaugucagauaugua

SEQ ID NO: 4933 - RNA, 17 nt, Homo sapiens
guaaaugcuuucaaguu

SEQ ID NO: 4934 - RNA, 17 nt, Homo sapiens
augcuuucaaguucaug

SEQ ID NO: 4935 - RNA, 17 nt, Homo sapiens
ucaaguucaugagccug

SEQ ID NO: 4936 - RNA, 17 nt, Homo sapiens
ucaugagccuggaaaga

SEQ ID NO: 4937 - RNA, 17 nt, Homo sapiens
caugagccuggaaagaa

SEQ ID NO: 4938 - RNA, 17 nt, Homo sapiens
aaagaaucaaaaccuuu

SEQ ID NO: 4939 - RNA, 17 nt, Homo sapiens
aucaaaaccuuugaaga

SEQ ID NO: 4940 - RNA, 17 nt, Homo sapiens
ucaaaaccuuugaagaa

SEQ ID NO: 4941 - RNA, 17 nt, Homo sapiens
ugaagaacuuuuaccga

SEQ ID NO: 4942 - RNA, 17 nt, Homo sapiens
acuuuuaccgaaugcca

SEQ ID NO: 4943 - RNA, 17 nt, Homo sapiens
ccgaaugccaccuccau

SEQ ID NO: 4944 - RNA, 17 nt, Homo sapiens
cgaaugccaccuccaug

SEQ ID NO: 4945 - RNA, 17 nt, Homo sapiens
aaugccaccuccauguu

SEQ ID NO: 4946 - RNA, 17 nt, Homo sapiens
augccaccuccauguuu

SEQ ID NO: 4947 - RNA, 17 nt, Homo sapiens
gccaccuccauguuuga

SEQ ID NO: 4948 - RNA, 17 nt, Homo sapiens
ccaccuccauguuugau

SEQ ID NO: 4949 - RNA, 17 nt, Homo sapiens
uugaugacuaccagggc

SEQ ID NO: 4950 - RNA, 17 nt, Homo sapiens
augacuaccagggcgac

SEQ ID NO: 4951 - RNA, 17 nt, Homo sapiens
ugacuaccagggcgaca

SEQ ID NO: 4952 - RNA, 17 nt, Homo sapiens
agggcgacagcagcacu

SEQ ID NO: 4953 - RNA, 17 nt, Homo sapiens
gcgacagcagcacucug

SEQ ID NO: 4954 - RNA, 17 nt, Homo sapiens
acagcagcacucuguug

SEQ ID NO: 4955 - RNA, 17 nt, Homo sapiens
agcagcacucuguuggc

SEQ ID NO: 4956 - RNA, 17 nt, Homo sapiens
cagcacucuguuggccu

SEQ ID NO: 4957 - RNA, 17 nt, Homo sapiens
cuguuggccucucccau

SEQ ID NO: 4958 - RNA, 17 nt, Homo sapiens
uguuggccucucccaug

SEQ ID NO: 4959 - RNA, 17 nt, Homo sapiens
uuggccucucccaugcu

SEQ ID NO: 4960 - RNA, 17 nt, Homo sapiens
ggccucucccaugcuga

SEQ ID NO: 4961 - RNA, 17 nt, Homo sapiens
gccucucccaugcugaa

SEQ ID NO: 4962 - RNA, 17 nt, Homo sapiens
ccucucccaugcugaag

SEQ ID NO: 4963 - RNA, 17 nt, Homo sapiens
ucccaugcugaagcgcu

SEQ ID NO: 4964 - RNA, 17 nt, Homo sapiens
ugaagcgcuucaccugg

SEQ ID NO: 4965 - RNA, 17 nt, Homo sapiens
agcgcuucaccuggacu

SEQ ID NO: 4966 - RNA, 17 nt, Homo sapiens
cgcuucaccuggacuga

SEQ ID NO: 4967 - RNA, 17 nt, Homo sapiens
gcuucaccuggacugac

SEQ ID NO: 4968 - RNA, 17 nt, Homo sapiens
accuggacugacagcaa

SEQ ID NO: 4969 - RNA, 17 nt, Homo sapiens
ggacugacagcaaaccc

SEQ ID NO: 4970 - RNA, 17 nt, Homo sapiens
cugacagcaaacccaag

SEQ ID NO: 4971 - RNA, 17 nt, Homo sapiens
cagcaaacccaaggccu

SEQ ID NO: 4972 - RNA, 17 nt, Homo sapiens
agcaaacccaaggccuc

SEQ ID NO: 4973 - RNA, 17 nt, Homo sapiens
gcaaacccaaggccucg

SEQ ID NO: 4974 - RNA, 17 nt, Homo sapiens
cccaaggccucgcucaa

SEQ ID NO: 4975 - RNA, 17 nt, Homo sapiens
ccaaggccucgcucaag

SEQ ID NO: 4976 - RNA, 17 nt, Homo sapiens
ggccucgcucaagauug

SEQ ID NO: 4977 - RNA, 17 nt, Homo sapiens
ccucgcucaagauugac

SEQ ID NO: 4978 - RNA, 17 nt, Homo sapiens
agauugacuugagagua

SEQ ID NO: 4979 - RNA, 17 nt, Homo sapiens
agaguaaccaguaaaag

SEQ ID NO: 4980 - RNA, 17 nt, Homo sapiens
gaguaaccaguaaaagu

SEQ ID NO: 4981 - RNA, 17 nt, Homo sapiens
gucggggcugucugaug

SEQ ID NO: 4982 - RNA, 17 nt, Homo sapiens
gggcugucugaugucag

SEQ ID NO: 4983 - RNA, 17 nt, Homo sapiens
cugaugucagcaggccc

SEQ ID NO: 4984 - RNA, 17 nt, Homo sapiens
augucagcaggcccagu

SEQ ID NO: 4985 - RNA, 17 nt, Homo sapiens
cagcaggcccaguuucu

SEQ ID NO: 4986 - RNA, 17 nt, Homo sapiens
agcaggcccaguuucug

SEQ ID NO: 4987 - RNA, 17 nt, Homo sapiens
gcaggcccaguuucugc

SEQ ID NO: 4988 - RNA, 17 nt, Homo sapiens
ccaguuucugccauucc

SEQ ID NO: 4989 - RNA, 17 nt, Homo sapiens
guuucugccauuccagc

SEQ ID NO: 4990 - RNA, 17 nt, Homo sapiens
uuucugccauuccagcu

SEQ ID NO: 4991 - RNA, 17 nt, Homo sapiens
ugccauuccagcugugg

SEQ ID NO: 4992 - RNA, 17 nt, Homo sapiens
gccauuccagcuguggg

SEQ ID NO: 4993 - RNA, 17 nt, Homo sapiens
auuccagcugugggcac

SEQ ID NO: 4994 - RNA, 17 nt, Homo sapiens
cugugggcacgucagcg

SEQ ID NO: 4995 - RNA, 17 nt, Homo sapiens
ggcacgucagcgaaggc

SEQ ID NO: 4996 - RNA, 17 nt, Homo sapiens
gcgaaggcaagcgcagg

SEQ ID NO: 4997 - RNA, 17 nt, Homo sapiens
gcaagcgcagguucacc

SEQ ID NO: 4998 - RNA, 17 nt, Homo sapiens
gcagguucaccuacgac

SEQ ID NO: 4999 - RNA, 17 nt, Homo sapiens
agguucaccuacgacca

SEQ ID NO: 5000 - RNA, 17 nt, Homo sapiens
gguucaccuacgaccac

SEQ ID NO: 5001 - RNA, 17 nt, Homo sapiens
ccuacgaccacgcugag

SEQ ID NO: 5002 - RNA, 17 nt, Homo sapiens
cuacgaccacgcugagc

SEQ ID NO: 5003 - RNA, 17 nt, Homo sapiens
gaccacgcugagcugga

SEQ ID NO: 5004 - RNA, 17 nt, Homo sapiens
cgcugagcuggaaagga

SEQ ID NO: 5005 - RNA, 17 nt, Homo sapiens
ucgcgugcugcuccccg

SEQ ID NO: 5006 - RNA, 17 nt, Homo sapiens
cgugcugcuccccgccc

SEQ ID NO: 5007 - RNA, 17 nt, Homo sapiens
ugcugcuccccgccccc

SEQ ID NO: 5008 - RNA, 17 nt, Homo sapiens
gcugcuccccgccccca

SEQ ID NO: 5009 - RNA, 17 nt, Homo sapiens
cugcuccccgcccccag

SEQ ID NO: 5010 - RNA, 17 nt, Homo sapiens
cuccccgcccccagacu

SEQ ID NO: 5011 - RNA, 17 nt, Homo sapiens
uccccgcccccagacua

SEQ ID NO: 5012 - RNA, 17 nt, Homo sapiens
ccccgcccccagacuac

SEQ ID NO: 5013 - RNA, 17 nt, Homo sapiens
cccgcccccagacuaca

SEQ ID NO: 5014 - RNA, 17 nt, Homo sapiens
ccgcccccagacuacaa

SEQ ID NO: 5015 - RNA, 17 nt, Homo sapiens
ccccagacuacaacucg

SEQ ID NO: 5016 - RNA, 17 nt, Homo sapiens
cagacuacaacucggug

SEQ ID NO: 5017 - RNA, 17 nt, Homo sapiens
acuacaacucggugguc

SEQ ID NO: 5018 - RNA, 17 nt, Homo sapiens
cggugguccuguacucc

SEQ ID NO: 5019 - RNA, 17 nt, Homo sapiens
ggugguccuguacucca

SEQ ID NO: 5020 - RNA, 17 nt, Homo sapiens
uccuguacuccacccca

SEQ ID NO: 5021 - RNA, 17 nt, Homo sapiens
cuguacuccaccccacc

SEQ ID NO: 5022 - RNA, 17 nt, Homo sapiens
uguacuccaccccaccc

SEQ ID NO: 5023 - RNA, 17 nt, Homo sapiens
uacuccaccccacccau

SEQ ID NO: 5024 - RNA, 17 nt, Homo sapiens
acuccaccccacccauc

SEQ ID NO: 5025 - RNA, 17 nt, Homo sapiens
cuccaccccacccaucu

SEQ ID NO: 5026 - RNA, 17 nt, Homo sapiens
uccaccccacccaucua

SEQ ID NO: 5027 - RNA, 17 nt, Homo sapiens
caccccacccaucuaga

SEQ ID NO: 5028 - RNA, 17 nt, Homo sapiens
accccacccaucuagag

SEQ ID NO: 5029 - RNA, 17 nt, Homo sapiens
ccccacccaucuagagu

SEQ ID NO: 5030 - RNA, 17 nt, Homo sapiens
cacccaucuagaguuug

SEQ ID NO: 5031 - RNA, 17 nt, Homo sapiens
aguuugacacgaagccu

SEQ ID NO: 5032 - RNA, 17 nt, Homo sapiens
cacgaagccuuauuucu

SEQ ID NO: 5033 - RNA, 17 nt, Homo sapiens
acgaagccuuauuucua

SEQ ID NO: 5034 - RNA, 17 nt, Homo sapiens
cuuauuucuagaagcac

SEQ ID NO: 5035 - RNA, 17 nt, Homo sapiens
cuagaagcacaugugua

SEQ ID NO: 5036 - RNA, 17 nt, Homo sapiens
agaagcacauguguauu

SEQ ID NO: 5037 - RNA, 17 nt, Homo sapiens
auuuauacccccaggaa

SEQ ID NO: 5038 - RNA, 17 nt, Homo sapiens
uuuauacccccaggaaa

SEQ ID NO: 5039 - RNA, 17 nt, Homo sapiens
uuauacccccaggaaac

SEQ ID NO: 5040 - RNA, 17 nt, Homo sapiens
uauacccccaggaaacu

SEQ ID NO: 5041 - RNA, 17 nt, Homo sapiens
auacccccaggaaacua

SEQ ID NO: 5042 - RNA, 17 nt, Homo sapiens
caggaaacuagcuuuug

SEQ ID NO: 5043 - RNA, 17 nt, Homo sapiens
aaacuagcuuuugccag

SEQ ID NO: 5044 - RNA, 17 nt, Homo sapiens
gcuuuugccaguauuau

SEQ ID NO: 5045 - RNA, 17 nt, Homo sapiens
cuuuugccaguauuaug

SEQ ID NO: 5046 - RNA, 17 nt, Homo sapiens
uauuaugcauauauaag

SEQ ID NO: 5047 - RNA, 17 nt, Homo sapiens
aaguuuacaccuuuauc

SEQ ID NO: 5048 - RNA, 17 nt, Homo sapiens
guuuacaccuuuaucuu

SEQ ID NO: 5049 - RNA, 17 nt, Homo sapiens
uuuacaccuuuaucuuu

SEQ ID NO: 5050 - RNA, 17 nt, Homo sapiens
ccuuuaucuuuccaugg

SEQ ID NO: 5051 - RNA, 17 nt, Homo sapiens
uaucuuuccaugggagc

SEQ ID NO: 5052 - RNA, 17 nt, Homo sapiens
aucuuuccaugggagcc

SEQ ID NO: 5053 - RNA, 17 nt, Homo sapiens
augggagccagcugcuu

SEQ ID NO: 5054 - RNA, 17 nt, Homo sapiens
ugggagccagcugcuuu

SEQ ID NO: 5055 - RNA, 17 nt, Homo sapiens
gagccagcugcuuuuug

SEQ ID NO: 5056 - RNA, 17 nt, Homo sapiens
ccagcugcuuuuuguga

SEQ ID NO: 5057 - RNA, 17 nt, Homo sapiens
aauagugcuuuuuuuuu

SEQ ID NO: 5058 - RNA, 17 nt, Homo sapiens
uuuuugacuaacaagaa

SEQ ID NO: 5059 - RNA, 17 nt, Homo sapiens
ugacuaacaagaaugua

SEQ ID NO: 5060 - RNA, 17 nt, Homo sapiens
aauguaacuccagauag

SEQ ID NO: 5061 - RNA, 17 nt, Homo sapiens
uguaacuccagauagag

SEQ ID NO: 5062 - RNA, 17 nt, Homo sapiens
guaacuccagauagaga

SEQ ID NO: 5063 - RNA, 17 nt, Homo sapiens
auagugacaagugaaga

SEQ ID NO: 5064 - RNA, 17 nt, Homo sapiens
ugaagaacacuacugcu

SEQ ID NO: 5065 - RNA, 17 nt, Homo sapiens
aagaacacuacugcuaa

SEQ ID NO: 5066 - RNA, 17 nt, Homo sapiens
aacacuacugcuaaauc

SEQ ID NO: 5067 - RNA, 17 nt, Homo sapiens
acuacugcuaaauccuc

SEQ ID NO: 5068 - RNA, 17 nt, Homo sapiens
gcuaaauccucauguua

SEQ ID NO: 5069 - RNA, 17 nt, Homo sapiens
cuaaauccucauguuac

SEQ ID NO: 5070 - RNA, 17 nt, Homo sapiens
aaauccucauguuacuc

SEQ ID NO: 5071 - RNA, 17 nt, Homo sapiens
cauguuacucaguguua

SEQ ID NO: 5072 - RNA, 17 nt, Homo sapiens
uguuacucaguguuaga

SEQ ID NO: 5073 - RNA, 17 nt, Homo sapiens
gagaaauccuuccuaaa

SEQ ID NO: 5074 - RNA, 17 nt, Homo sapiens
agaaauccuuccuaaac

SEQ ID NO: 5075 - RNA, 17 nt, Homo sapiens
aauccuuccuaaaccca

SEQ ID NO: 5076 - RNA, 17 nt, Homo sapiens
auccuuccuaaacccaa

SEQ ID NO: 5077 - RNA, 17 nt, Homo sapiens
uccuaaacccaaugacu

SEQ ID NO: 5078 - RNA, 17 nt, Homo sapiens
ccuaaacccaaugacuu

SEQ ID NO: 5079 - RNA, 17 nt, Homo sapiens
cuaaacccaaugacuuc

SEQ ID NO: 5080 - RNA, 17 nt, Homo sapiens
ccaaugacuucccugcu

SEQ ID NO: 5081 - RNA, 17 nt, Homo sapiens
augacuucccugcucca

SEQ ID NO: 5082 - RNA, 17 nt, Homo sapiens
ugacuucccugcuccaa

SEQ ID NO: 5083 - RNA, 17 nt, Homo sapiens
gacuucccugcuccaac

SEQ ID NO: 5084 - RNA, 17 nt, Homo sapiens
uucccugcuccaacccc

SEQ ID NO: 5085 - RNA, 17 nt, Homo sapiens
cccugcuccaacccccg

SEQ ID NO: 5086 - RNA, 17 nt, Homo sapiens
ccugcuccaacccccgc

SEQ ID NO: 5087 - RNA, 17 nt, Homo sapiens
gcuccaacccccgccac

SEQ ID NO: 5088 - RNA, 17 nt, Homo sapiens
cuccaacccccgccacc

SEQ ID NO: 5089 - RNA, 17 nt, Homo sapiens
uccaacccccgccaccu

SEQ ID NO: 5090 - RNA, 17 nt, Homo sapiens
ccaacccccgccaccuc

SEQ ID NO: 5091 - RNA, 17 nt, Homo sapiens
acccccgccaccucagg

SEQ ID NO: 5092 - RNA, 17 nt, Homo sapiens
cccccgccaccucaggg

SEQ ID NO: 5093 - RNA, 17 nt, Homo sapiens
cccgccaccucagggca

SEQ ID NO: 5094 - RNA, 17 nt, Homo sapiens
ccgccaccucagggcac

SEQ ID NO: 5095 - RNA, 17 nt, Homo sapiens
gccaccucagggcacgc

SEQ ID NO: 5096 - RNA, 17 nt, Homo sapiens
cucagggcacgcaggac

SEQ ID NO: 5097 - RNA, 17 nt, Homo sapiens
gggcacgcaggaccagu

SEQ ID NO: 5098 - RNA, 17 nt, Homo sapiens
cgcaggaccaguuugau

SEQ ID NO: 5099 - RNA, 17 nt, Homo sapiens
gcaggaccaguuugauu

SEQ ID NO: 5100 - RNA, 17 nt, Homo sapiens
ugaggagcugcacugau

SEQ ID NO: 5101 - RNA, 17 nt, Homo sapiens
ggagcugcacugaucac

SEQ ID NO: 5102 - RNA, 17 nt, Homo sapiens
agcugcacugaucaccc

SEQ ID NO: 5103 - RNA, 17 nt, Homo sapiens
cacugaucacccaaugc

SEQ ID NO: 5104 - RNA, 17 nt, Homo sapiens
cugaucacccaaugcau

SEQ ID NO: 5105 - RNA, 17 nt, Homo sapiens
ugaucacccaaugcauc

SEQ ID NO: 5106 - RNA, 17 nt, Homo sapiens
gaucacccaaugcauca

SEQ ID NO: 5107 - RNA, 17 nt, Homo sapiens
cccaaugcaucacguac

SEQ ID NO: 5108 - RNA, 17 nt, Homo sapiens
aaugcaucacguacccc

SEQ ID NO: 5109 - RNA, 17 nt, Homo sapiens
ucacguaccccacuggg

SEQ ID NO: 5110 - RNA, 17 nt, Homo sapiens
cacguaccccacugggc

SEQ ID NO: 5111 - RNA, 17 nt, Homo sapiens
acguaccccacugggcc

SEQ ID NO: 5112 - RNA, 17 nt, Homo sapiens
cguaccccacugggcca

SEQ ID NO: 5113 - RNA, 17 nt, Homo sapiens
uaccccacugggccagc

SEQ ID NO: 5114 - RNA, 17 nt, Homo sapiens
cacugggccagcccugc

SEQ ID NO: 5115 - RNA, 17 nt, Homo sapiens
acugggccagcccugca

SEQ ID NO: 5116 - RNA, 17 nt, Homo sapiens
gggccagcccugcagcc

SEQ ID NO: 5117 - RNA, 17 nt, Homo sapiens
ggccagcccugcagccc

SEQ ID NO: 5118 - RNA, 17 nt, Homo sapiens
gccagcccugcagccca

SEQ ID NO: 5119 - RNA, 17 nt, Homo sapiens
agcccugcagcccaaaa

SEQ ID NO: 5120 - RNA, 17 nt, Homo sapiens
ccugcagcccaaaaccc

SEQ ID NO: 5121 - RNA, 17 nt, Homo sapiens
cugcagcccaaaaccca

SEQ ID NO: 5122 - RNA, 17 nt, Homo sapiens
ugcagcccaaaacccag

SEQ ID NO: 5123 - RNA, 17 nt, Homo sapiens
cccaaaacccagggcaa

SEQ ID NO: 5124 - RNA, 17 nt, Homo sapiens
ccaaaacccagggcaac

SEQ ID NO: 5125 - RNA, 17 nt, Homo sapiens
caaaacccagggcaaca

SEQ ID NO: 5126 - RNA, 17 nt, Homo sapiens
cccagggcaacaagccc

SEQ ID NO: 5127 - RNA, 17 nt, Homo sapiens
agggcaacaagcccguu

SEQ ID NO: 5128 - RNA, 17 nt, Homo sapiens
caacaagcccguuagcc

SEQ ID NO: 5129 - RNA, 17 nt, Homo sapiens
aacaagcccguuagccc

SEQ ID NO: 5130 - RNA, 17 nt, Homo sapiens
ccguuagccccagggga

SEQ ID NO: 5131 - RNA, 17 nt, Homo sapiens
cguuagccccaggggau

SEQ ID NO: 5132 - RNA, 17 nt, Homo sapiens
guuagccccaggggauc

SEQ ID NO: 5133 - RNA, 17 nt, Homo sapiens
uuagccccaggggauca

SEQ ID NO: 5134 - RNA, 17 nt, Homo sapiens
aggggaucacuggcugg

SEQ ID NO: 5135 - RNA, 17 nt, Homo sapiens
gggaucacuggcuggcc

SEQ ID NO: 5136 - RNA, 17 nt, Homo sapiens
ucacuggcuggccugag

SEQ ID NO: 5137 - RNA, 17 nt, Homo sapiens
uggcuggccugagcaac

SEQ ID NO: 5138 - RNA, 17 nt, Homo sapiens
ggcuggccugagcaaca

SEQ ID NO: 5139 - RNA, 17 nt, Homo sapiens
gccugagcaacaucucg

SEQ ID NO: 5140 - RNA, 17 nt, Homo sapiens
ugagcaacaucucggga

SEQ ID NO: 5141 - RNA, 17 nt, Homo sapiens
gcaacaucucgggaguc

SEQ ID NO: 5142 - RNA, 17 nt, Homo sapiens
cgggaguccucuagcag

SEQ ID NO: 5143 - RNA, 17 nt, Homo sapiens
gggaguccucuagcagg

SEQ ID NO: 5144 - RNA, 17 nt, Homo sapiens
gaguccucuagcaggcc

SEQ ID NO: 5145 - RNA, 17 nt, Homo sapiens
ccucuagcaggccuaag

SEQ ID NO: 5146 - RNA, 17 nt, Homo sapiens
uagcaggccuaagacau

SEQ ID NO: 5147 - RNA, 17 nt, Homo sapiens
agcaggccuaagacaug

SEQ ID NO: 5148 - RNA, 17 nt, Homo sapiens
ccuaagacaugugagga

SEQ ID NO: 5149 - RNA, 17 nt, Homo sapiens
aaaaaagcaaaaagcaa

SEQ ID NO: 5150 - RNA, 17 nt, Homo sapiens
caaaaagcaagggagaa

SEQ ID NO: 5151 - RNA, 17 nt, Homo sapiens
agagaaaccgggagaag

SEQ ID NO: 5152 - RNA, 17 nt, Homo sapiens
gagaaggcaugagaaag

SEQ ID NO: 5153 - RNA, 17 nt, Homo sapiens
ugagacgcaccaugugg

SEQ ID NO: 5154 - RNA, 17 nt, Homo sapiens
agacgcaccaugugggc

SEQ ID NO: 5155 - RNA, 17 nt, Homo sapiens
gacgcaccaugugggca

SEQ ID NO: 5156 - RNA, 17 nt, Homo sapiens
augugggcacggagggg

SEQ ID NO: 5157 - RNA, 17 nt, Homo sapiens
gacggggcucagcaaug

SEQ ID NO: 5158 - RNA, 17 nt, Homo sapiens
cggggcucagcaaugcc

SEQ ID NO: 5159 - RNA, 17 nt, Homo sapiens
ggcucagcaaugccauu

SEQ ID NO: 5160 - RNA, 17 nt, Homo sapiens
agcaaugccauuucagu

SEQ ID NO: 5161 - RNA, 17 nt, Homo sapiens
gcaaugccauuucagug

SEQ ID NO: 5162 - RNA, 17 nt, Homo sapiens
gccauuucaguggcuuc

SEQ ID NO: 5163 - RNA, 17 nt, Homo sapiens
ucaguggcuucccagcu

SEQ ID NO: 5164 - RNA, 17 nt, Homo sapiens
guggcuucccagcucug

SEQ ID NO: 5165 - RNA, 17 nt, Homo sapiens
uggcuucccagcucuga

SEQ ID NO: 5166 - RNA, 17 nt, Homo sapiens
ggcuucccagcucugac

SEQ ID NO: 5167 - RNA, 17 nt, Homo sapiens
uucccagcucugacccu

SEQ ID NO: 5168 - RNA, 17 nt, Homo sapiens
cccagcucugacccuuc

SEQ ID NO: 5169 - RNA, 17 nt, Homo sapiens
gcucugacccuucuaca

SEQ ID NO: 5170 - RNA, 17 nt, Homo sapiens
cucugacccuucuacau

SEQ ID NO: 5171 - RNA, 17 nt, Homo sapiens
ucugacccuucuacauu

SEQ ID NO: 5172 - RNA, 17 nt, Homo sapiens
gacccuucuacauuuga

SEQ ID NO: 5173 - RNA, 17 nt, Homo sapiens
ccuucuacauuugaggg

SEQ ID NO: 5174 - RNA, 17 nt, Homo sapiens
uugagggcccagccagg

SEQ ID NO: 5175 - RNA, 17 nt, Homo sapiens
ugagggcccagccagga

SEQ ID NO: 5176 - RNA, 17 nt, Homo sapiens
gagggcccagccaggag

SEQ ID NO: 5177 - RNA, 17 nt, Homo sapiens
ggcccagccaggagcag

SEQ ID NO: 5178 - RNA, 17 nt, Homo sapiens
gcccagccaggagcaga

SEQ ID NO: 5179 - RNA, 17 nt, Homo sapiens
ccaggagcagauggaca

SEQ ID NO: 5180 - RNA, 17 nt, Homo sapiens
agauggacagcgaugag

SEQ ID NO: 5181 - RNA, 17 nt, Homo sapiens
gaggggacauuuucugg

SEQ ID NO: 5182 - RNA, 17 nt, Homo sapiens
acauuuucuggauucug

SEQ ID NO: 5183 - RNA, 17 nt, Homo sapiens
cuggauucugggaggca

SEQ ID NO: 5184 - RNA, 17 nt, Homo sapiens
ugggaggcaagaaaagg

SEQ ID NO: 5185 - RNA, 17 nt, Homo sapiens
aaaaggacaaauaucuu

SEQ ID NO: 5186 - RNA, 17 nt, Homo sapiens
caaauaucuuuuuugga

SEQ ID NO: 5187 - RNA, 17 nt, Homo sapiens
uuuggaacuaaagcaaa

SEQ ID NO: 5188 - RNA, 17 nt, Homo sapiens
acuaaagcaaauuuuag

SEQ ID NO: 5189 - RNA, 17 nt, Homo sapiens
uuuuagaccuuuaccua

SEQ ID NO: 5190 - RNA, 17 nt, Homo sapiens
uuuagaccuuuaccuau

SEQ ID NO: 5191 - RNA, 17 nt, Homo sapiens
accuuuaccuauggaag

SEQ ID NO: 5192 - RNA, 17 nt, Homo sapiens
ccuuuaccuauggaagu

SEQ ID NO: 5193 - RNA, 17 nt, Homo sapiens
agugguucuauguccau

SEQ ID NO: 5194 - RNA, 17 nt, Homo sapiens
ucuauguccauucucau

SEQ ID NO: 5195 - RNA, 17 nt, Homo sapiens
cuauguccauucucauu

SEQ ID NO: 5196 - RNA, 17 nt, Homo sapiens
guccauucucauucgug

SEQ ID NO: 5197 - RNA, 17 nt, Homo sapiens
ccauucucauucguggc

SEQ ID NO: 5198 - RNA, 17 nt, Homo sapiens
uucguggcauguuuuga

SEQ ID NO: 5199 - RNA, 17 nt, Homo sapiens
uuuguagcacugagggu

SEQ ID NO: 5200 - RNA, 17 nt, Homo sapiens
uguagcacugagggugg

SEQ ID NO: 5201 - RNA, 17 nt, Homo sapiens
aggguggcacucaacuc

SEQ ID NO: 5202 - RNA, 17 nt, Homo sapiens
gguggcacucaacucug

SEQ ID NO: 5203 - RNA, 17 nt, Homo sapiens
uggcacucaacucugag

SEQ ID NO: 5204 - RNA, 17 nt, Homo sapiens
cacucaacucugagccc

SEQ ID NO: 5205 - RNA, 17 nt, Homo sapiens
cucaacucugagcccau

SEQ ID NO: 5206 - RNA, 17 nt, Homo sapiens
cucugagcccauacuuu

SEQ ID NO: 5207 - RNA, 17 nt, Homo sapiens
ucugagcccauacuuuu

SEQ ID NO: 5208 - RNA, 17 nt, Homo sapiens
cugagcccauacuuuug

SEQ ID NO: 5209 - RNA, 17 nt, Homo sapiens
gcccauacuuuuggcuc

SEQ ID NO: 5210 - RNA, 17 nt, Homo sapiens
cuuuuggcuccucuagu

SEQ ID NO: 5211 - RNA, 17 nt, Homo sapiens
uuuggcuccucuaguaa

SEQ ID NO: 5212 - RNA, 17 nt, Homo sapiens
uuggcuccucuaguaag

SEQ ID NO: 5213 - RNA, 17 nt, Homo sapiens
ggcuccucuaguaagau

SEQ ID NO: 5214 - RNA, 17 nt, Homo sapiens
uaagaugcacugaaaac

SEQ ID NO: 5215 - RNA, 17 nt, Homo sapiens
agaugcacugaaaacuu

SEQ ID NO: 5216 - RNA, 17 nt, Homo sapiens
cugaaaacuuagccaga

SEQ ID NO: 5217 - RNA, 17 nt, Homo sapiens
aacuuagccagaguuag

SEQ ID NO: 5218 - RNA, 17 nt, Homo sapiens
acuuagccagaguuagg

SEQ ID NO: 5219 - RNA, 17 nt, Homo sapiens
agguugucuccaggcca

SEQ ID NO: 5220 - RNA, 17 nt, Homo sapiens
guugucuccaggccaug

SEQ ID NO: 5221 - RNA, 17 nt, Homo sapiens
uugucuccaggccauga

SEQ ID NO: 5222 - RNA, 17 nt, Homo sapiens
cuccaggccaugauggc

SEQ ID NO: 5223 - RNA, 17 nt, Homo sapiens
uccaggccaugauggcc

SEQ ID NO: 5224 - RNA, 17 nt, Homo sapiens
augauggccuuacacug

SEQ ID NO: 5225 - RNA, 17 nt, Homo sapiens
ugauggccuuacacuga

SEQ ID NO: 5226 - RNA, 17 nt, Homo sapiens
ggccuuacacugaaaau

SEQ ID NO: 5227 - RNA, 17 nt, Homo sapiens
ccuuacacugaaaaugu

SEQ ID NO: 5228 - RNA, 17 nt, Homo sapiens
aaaaugucacauucuau

SEQ ID NO: 5229 - RNA, 17 nt, Homo sapiens
aaugucacauucuauuu

SEQ ID NO: 5230 - RNA, 17 nt, Homo sapiens
ucacauucuauuuuggg

SEQ ID NO: 5231 - RNA, 17 nt, Homo sapiens
auauaguccagacacuu

SEQ ID NO: 5232 - RNA, 17 nt, Homo sapiens
uauaguccagacacuua

SEQ ID NO: 5233 - RNA, 17 nt, Homo sapiens
guccagacacuuaacuc

SEQ ID NO: 5234 - RNA, 17 nt, Homo sapiens
ccagacacuuaacucaa

SEQ ID NO: 5235 - RNA, 17 nt, Homo sapiens
cacuuaacucaauuucu

SEQ ID NO: 5236 - RNA, 17 nt, Homo sapiens
cuuaacucaauuucuug

SEQ ID NO: 5237 - RNA, 17 nt, Homo sapiens
ucaauuucuugguauua

SEQ ID NO: 5238 - RNA, 17 nt, Homo sapiens
uauuauucuguuuugca

SEQ ID NO: 5239 - RNA, 17 nt, Homo sapiens
uguuuugcacaguuagu

SEQ ID NO: 5240 - RNA, 17 nt, Homo sapiens
uuuugcacaguuaguug

SEQ ID NO: 5241 - RNA, 17 nt, Homo sapiens
aagaaagcugagaagaa

SEQ ID NO: 5242 - RNA, 17 nt, Homo sapiens
gaaaaugcaguccugag

SEQ ID NO: 5243 - RNA, 17 nt, Homo sapiens
augcaguccugaggaga

SEQ ID NO: 5244 - RNA, 17 nt, Homo sapiens
ugcaguccugaggagag

SEQ ID NO: 5245 - RNA, 17 nt, Homo sapiens
gaguuuucuccauauca

SEQ ID NO: 5246 - RNA, 17 nt, Homo sapiens
guuuucuccauaucaaa

SEQ ID NO: 5247 - RNA, 17 nt, Homo sapiens
uuuucuccauaucaaaa

SEQ ID NO: 5248 - RNA, 17 nt, Homo sapiens
uccauaucaaaacgagg

SEQ ID NO: 5249 - RNA, 17 nt, Homo sapiens
acgagggcugauggagg

SEQ ID NO: 5250 - RNA, 17 nt, Homo sapiens
aaaaggucaauaagguc

SEQ ID NO: 5251 - RNA, 17 nt, Homo sapiens
auaaggucaagggaaga

SEQ ID NO: 5252 - RNA, 17 nt, Homo sapiens
gggaagaccccgucucu

SEQ ID NO: 5253 - RNA, 17 nt, Homo sapiens
ggaagaccccgucucua

SEQ ID NO: 5254 - RNA, 17 nt, Homo sapiens
gaagaccccgucucuau

SEQ ID NO: 5255 - RNA, 17 nt, Homo sapiens
accccgucucuauacca

SEQ ID NO: 5256 - RNA, 17 nt, Homo sapiens
cccgucucuauaccaac

SEQ ID NO: 5257 - RNA, 17 nt, Homo sapiens
cucuauaccaaccaaac

SEQ ID NO: 5258 - RNA, 17 nt, Homo sapiens
ucuauaccaaccaaacc

SEQ ID NO: 5259 - RNA, 17 nt, Homo sapiens
auaccaaccaaaccaau

SEQ ID NO: 5260 - RNA, 17 nt, Homo sapiens
uaccaaccaaaccaauu

SEQ ID NO: 5261 - RNA, 17 nt, Homo sapiens
aaccaaaccaauucacc

SEQ ID NO: 5262 - RNA, 17 nt, Homo sapiens
accaaaccaauucacca

SEQ ID NO: 5263 - RNA, 17 nt, Homo sapiens
accaauucaccaacaca

SEQ ID NO: 5264 - RNA, 17 nt, Homo sapiens
caauucaccaacacagu

SEQ ID NO: 5265 - RNA, 17 nt, Homo sapiens
aauucaccaacacaguu

SEQ ID NO: 5266 - RNA, 17 nt, Homo sapiens
ucaccaacacaguuggg

SEQ ID NO: 5267 - RNA, 17 nt, Homo sapiens
accaacacaguugggac

SEQ ID NO: 5268 - RNA, 17 nt, Homo sapiens
guugggacccaaaacac

SEQ ID NO: 5269 - RNA, 17 nt, Homo sapiens
uugggacccaaaacaca

SEQ ID NO: 5270 - RNA, 17 nt, Homo sapiens
ugggacccaaaacacag

SEQ ID NO: 5271 - RNA, 17 nt, Homo sapiens
cccaaaacacaggaagu

SEQ ID NO: 5272 - RNA, 17 nt, Homo sapiens
caaaacacaggaaguca

SEQ ID NO: 5273 - RNA, 17 nt, Homo sapiens
aggaagucagucacguu

SEQ ID NO: 5274 - RNA, 17 nt, Homo sapiens
agucagucacguuuccu

SEQ ID NO: 5275 - RNA, 17 nt, Homo sapiens
cacguuuccuuuucauu

SEQ ID NO: 5276 - RNA, 17 nt, Homo sapiens
acguuuccuuuucauuu

SEQ ID NO: 5277 - RNA, 17 nt, Homo sapiens
uccuuuucauuuaaugg

SEQ ID NO: 5278 - RNA, 17 nt, Homo sapiens
ggggauuccacuaucuc

SEQ ID NO: 5279 - RNA, 17 nt, Homo sapiens
gggauuccacuaucuca

SEQ ID NO: 5280 - RNA, 17 nt, Homo sapiens
gauuccacuaucucaca

SEQ ID NO: 5281 - RNA, 17 nt, Homo sapiens
ccacuaucucacacuaa

SEQ ID NO: 5282 - RNA, 17 nt, Homo sapiens
acuaucucacacuaauc

SEQ ID NO: 5283 - RNA, 17 nt, Homo sapiens
uaucucacacuaaucug

SEQ ID NO: 5284 - RNA, 17 nt, Homo sapiens
ucucacacuaaucugaa

SEQ ID NO: 5285 - RNA, 17 nt, Homo sapiens
cacuaaucugaaaggau

SEQ ID NO: 5286 - RNA, 17 nt, Homo sapiens
ggaagagcauuagcugg

SEQ ID NO: 5287 - RNA, 17 nt, Homo sapiens
gcauuagcuggcgcaua

SEQ ID NO: 5288 - RNA, 17 nt, Homo sapiens
gcuggcgcauauuaagc

SEQ ID NO: 5289 - RNA, 17 nt, Homo sapiens
uauuaagcacuuuaagc

SEQ ID NO: 5290 - RNA, 17 nt, Homo sapiens
uuaagcacuuuaagcuc

SEQ ID NO: 5291 - RNA, 17 nt, Homo sapiens
cuuuaagcuccuugagu

SEQ ID NO: 5292 - RNA, 17 nt, Homo sapiens
uuaagcuccuugaguaa

SEQ ID NO: 5293 - RNA, 17 nt, Homo sapiens
uaagcuccuugaguaaa

SEQ ID NO: 5294 - RNA, 17 nt, Homo sapiens
auuuaugcaagguauuu

SEQ ID NO: 5295 - RNA, 17 nt, Homo sapiens
gguauuucuccaguugg

SEQ ID NO: 5296 - RNA, 17 nt, Homo sapiens
uauuucuccaguuggga

SEQ ID NO: 5297 - RNA, 17 nt, Homo sapiens
auuucuccaguugggac

SEQ ID NO: 5298 - RNA, 17 nt, Homo sapiens
guugggacucaggauau

SEQ ID NO: 5299 - RNA, 17 nt, Homo sapiens
ugggacucaggauauua

SEQ ID NO: 5300 - RNA, 17 nt, Homo sapiens
uaaugagccaucacuag

SEQ ID NO: 5301 - RNA, 17 nt, Homo sapiens
aaugagccaucacuaga

SEQ ID NO: 5302 - RNA, 17 nt, Homo sapiens
gagccaucacuagaaga

SEQ ID NO: 5303 - RNA, 17 nt, Homo sapiens
gccaucacuagaagaaa

SEQ ID NO: 5304 - RNA, 17 nt, Homo sapiens
agaaaagcccauuuuca

SEQ ID NO: 5305 - RNA, 17 nt, Homo sapiens
gaaaagcccauuuucaa

SEQ ID NO: 5306 - RNA, 17 nt, Homo sapiens
aaaagcccauuuucaac

SEQ ID NO: 5307 - RNA, 17 nt, Homo sapiens
ccauuuucaacugcuuu

SEQ ID NO: 5308 - RNA, 17 nt, Homo sapiens
uuuucaacugcuuugaa

SEQ ID NO: 5309 - RNA, 17 nt, Homo sapiens
ucaacugcuuugaaacu

SEQ ID NO: 5310 - RNA, 17 nt, Homo sapiens
uuugaaacuugccuggg

SEQ ID NO: 5311 - RNA, 17 nt, Homo sapiens
aaacuugccuggggucu

SEQ ID NO: 5312 - RNA, 17 nt, Homo sapiens
aacuugccuggggucug

SEQ ID NO: 5313 - RNA, 17 nt, Homo sapiens
cuggggucugagcauga

SEQ ID NO: 5314 - RNA, 17 nt, Homo sapiens
gucugagcaugauggga

SEQ ID NO: 5315 - RNA, 17 nt, Homo sapiens
agggagacaggguagga

SEQ ID NO: 5316 - RNA, 17 nt, Homo sapiens
aagggcgccuacucuuc

SEQ ID NO: 5317 - RNA, 17 nt, Homo sapiens
agggcgccuacucuuca

SEQ ID NO: 5318 - RNA, 17 nt, Homo sapiens
gcgccuacucuucaggg

SEQ ID NO: 5319 - RNA, 17 nt, Homo sapiens
gccuacucuucaggguc

SEQ ID NO: 5320 - RNA, 17 nt, Homo sapiens
uacucuucagggucuaa

SEQ ID NO: 5321 - RNA, 17 nt, Homo sapiens
ucagggucuaaagauca

SEQ ID NO: 5322 - RNA, 17 nt, Homo sapiens
uaaagaucaagugggcc

SEQ ID NO: 5323 - RNA, 17 nt, Homo sapiens
aagugggccuuggaucg

SEQ ID NO: 5324 - RNA, 17 nt, Homo sapiens
agugggccuuggaucgc

SEQ ID NO: 5325 - RNA, 17 nt, Homo sapiens
uggaucgcuaagcuggc

SEQ ID NO: 5326 - RNA, 17 nt, Homo sapiens
cgcuaagcuggcucugu

SEQ ID NO: 5327 - RNA, 17 nt, Homo sapiens
aagcuggcucuguuuga

SEQ ID NO: 5328 - RNA, 17 nt, Homo sapiens
gcuggcucuguuugaug

SEQ ID NO: 5329 - RNA, 17 nt, Homo sapiens
uuugaugcuauuuaugc

SEQ ID NO: 5330 - RNA, 17 nt, Homo sapiens
auuuaugcaaguuaggg

SEQ ID NO: 5331 - RNA, 17 nt, Homo sapiens
uuagggucuauguauuu

SEQ ID NO: 5332 - RNA, 17 nt, Homo sapiens
ggaugcgccuacucuuc

SEQ ID NO: 5333 - RNA, 17 nt, Homo sapiens
gaugcgccuacucuuca

SEQ ID NO: 5334 - RNA, 17 nt, Homo sapiens
aggaugucugcaccuuc

SEQ ID NO: 5335 - RNA, 17 nt, Homo sapiens
augucugcaccuucugc

SEQ ID NO: 5336 - RNA, 17 nt, Homo sapiens
gucugcaccuucugcag

SEQ ID NO: 5337 - RNA, 17 nt, Homo sapiens
ucugcaccuucugcagc

SEQ ID NO: 5338 - RNA, 17 nt, Homo sapiens
gcaccuucugcagccag

SEQ ID NO: 5339 - RNA, 17 nt, Homo sapiens
ccuucugcagccaguca

SEQ ID NO: 5340 - RNA, 17 nt, Homo sapiens
ucugcagccagucagaa

SEQ ID NO: 5341 - RNA, 17 nt, Homo sapiens
cugcagccagucagaag

SEQ ID NO: 5342 - RNA, 17 nt, Homo sapiens
agccagucagaagcugg

SEQ ID NO: 5343 - RNA, 17 nt, Homo sapiens
ucagaagcuggagaggc

SEQ ID NO: 5344 - RNA, 17 nt, Homo sapiens
ggagaggcaacagugga

SEQ ID NO: 5345 - RNA, 17 nt, Homo sapiens
gaggcaacaguggauug

SEQ ID NO: 5346 - RNA, 17 nt, Homo sapiens
uggauugcugcuucuug

SEQ ID NO: 5347 - RNA, 17 nt, Homo sapiens
auugcugcuucuugggg

SEQ ID NO: 5348 - RNA, 17 nt, Homo sapiens
gcugcuucuuggggaga

SEQ ID NO: 5349 - RNA, 17 nt, Homo sapiens
gaguaugcuuccuuuua

SEQ ID NO: 5350 - RNA, 17 nt, Homo sapiens
uaugcuuccuuuuaucc

SEQ ID NO: 5351 - RNA, 17 nt, Homo sapiens
augcuuccuuuuaucca

SEQ ID NO: 5352 - RNA, 17 nt, Homo sapiens
cuuuuauccauguaauu

SEQ ID NO: 5353 - RNA, 17 nt, Homo sapiens
uuuuauccauguaauuu

SEQ ID NO: 5354 - RNA, 17 nt, Homo sapiens
aauuuaacuguagaacc

SEQ ID NO: 5355 - RNA, 17 nt, Homo sapiens
uguagaaccugagcucu

SEQ ID NO: 5356 - RNA, 17 nt, Homo sapiens
guagaaccugagcucua

SEQ ID NO: 5357 - RNA, 17 nt, Homo sapiens
accugagcucuaaguaa

SEQ ID NO: 5358 - RNA, 17 nt, Homo sapiens
cugagcucuaaguaacc

SEQ ID NO: 5359 - RNA, 17 nt, Homo sapiens
uaaguaaccgaagaaug

SEQ ID NO: 5360 - RNA, 17 nt, Homo sapiens
auguaugccucuguucu

SEQ ID NO: 5361 - RNA, 17 nt, Homo sapiens
uguaugccucuguucuu

SEQ ID NO: 5362 - RNA, 17 nt, Homo sapiens
uaugccucuguucuuau

SEQ ID NO: 5363 - RNA, 17 nt, Homo sapiens
cucuguucuuaugugcc

SEQ ID NO: 5364 - RNA, 17 nt, Homo sapiens
uuaugugccacauccuu

SEQ ID NO: 5365 - RNA, 17 nt, Homo sapiens
uaugugccacauccuug

SEQ ID NO: 5366 - RNA, 17 nt, Homo sapiens
ugugccacauccuuguu

SEQ ID NO: 5367 - RNA, 17 nt, Homo sapiens
gccacauccuuguuuaa

SEQ ID NO: 5368 - RNA, 17 nt, Homo sapiens
ccacauccuuguuuaaa

SEQ ID NO: 5369 - RNA, 17 nt, Homo sapiens
uuaaaggcucucuguau

SEQ ID NO: 5370 - RNA, 17 nt, Homo sapiens
aaaggcucucuguauga

SEQ ID NO: 5371 - RNA, 17 nt, Homo sapiens
aggcucucuguaugaag

SEQ ID NO: 5372 - RNA, 17 nt, Homo sapiens
gaugggaccgucaucag

SEQ ID NO: 5373 - RNA, 17 nt, Homo sapiens
ggaccgucaucagcaca

SEQ ID NO: 5374 - RNA, 17 nt, Homo sapiens
ccgucaucagcacauuc

SEQ ID NO: 5375 - RNA, 17 nt, Homo sapiens
ucaucagcacauucccu

SEQ ID NO: 5376 - RNA, 17 nt, Homo sapiens
aucagcacauucccuag

SEQ ID NO: 5377 - RNA, 17 nt, Homo sapiens
gcacauucccuagugag

SEQ ID NO: 5378 - RNA, 17 nt, Homo sapiens
cacauucccuagugagc

SEQ ID NO: 5379 - RNA, 17 nt, Homo sapiens
acauucccuagugagcc

SEQ ID NO: 5380 - RNA, 17 nt, Homo sapiens
uagugagccuacuggcu

SEQ ID NO: 5381 - RNA, 17 nt, Homo sapiens
agugagccuacuggcuc

SEQ ID NO: 5382 - RNA, 17 nt, Homo sapiens
gagccuacuggcuccug

SEQ ID NO: 5383 - RNA, 17 nt, Homo sapiens
cuacuggcuccuggcag

SEQ ID NO: 5384 - RNA, 17 nt, Homo sapiens
acuggcuccuggcagcg

SEQ ID NO: 5385 - RNA, 17 nt, Homo sapiens
cuggcuccuggcagcgg

SEQ ID NO: 5386 - RNA, 17 nt, Homo sapiens
cuccuggcagcggcuuu

SEQ ID NO: 5387 - RNA, 17 nt, Homo sapiens
gcagcggcuuuugugga

SEQ ID NO: 5388 - RNA, 17 nt, Homo sapiens
uggaagacucacuagcc

SEQ ID NO: 5389 - RNA, 17 nt, Homo sapiens
gaagacucacuagccag

SEQ ID NO: 5390 - RNA, 17 nt, Homo sapiens
agacucacuagccagaa

SEQ ID NO: 5391 - RNA, 17 nt, Homo sapiens
ucacuagccagaagaga

SEQ ID NO: 5392 - RNA, 17 nt, Homo sapiens
cacuagccagaagagag

SEQ ID NO: 5393 - RNA, 17 nt, Homo sapiens
agugggacaguccucuc

SEQ ID NO: 5394 - RNA, 17 nt, Homo sapiens
ggacaguccucuccacc

SEQ ID NO: 5395 - RNA, 17 nt, Homo sapiens
gacaguccucuccacca

SEQ ID NO: 5396 - RNA, 17 nt, Homo sapiens
caguccucuccaccaag

SEQ ID NO: 5397 - RNA, 17 nt, Homo sapiens
guccucuccaccaagau

SEQ ID NO: 5398 - RNA, 17 nt, Homo sapiens
uccucuccaccaagauc

SEQ ID NO: 5399 - RNA, 17 nt, Homo sapiens
cucuccaccaagaucua

SEQ ID NO: 5400 - RNA, 17 nt, Homo sapiens
ucuccaccaagaucuaa

SEQ ID NO: 5401 - RNA, 17 nt, Homo sapiens
ccaagaucuaaauccaa

SEQ ID NO: 5402 - RNA, 17 nt, Homo sapiens
ucuaaauccaaacaaaa

SEQ ID NO: 5403 - RNA, 17 nt, Homo sapiens
cuaaauccaaacaaaag

SEQ ID NO: 5404 - RNA, 17 nt, Homo sapiens
auccaaacaaaagcagg

SEQ ID NO: 5405 - RNA, 17 nt, Homo sapiens
acaaaagcaggcuagag

SEQ ID NO: 5406 - RNA, 17 nt, Homo sapiens
aagcaggcuagagccag

SEQ ID NO: 5407 - RNA, 17 nt, Homo sapiens
gcuagagccagaagaga

SEQ ID NO: 5408 - RNA, 17 nt, Homo sapiens
cuagagccagaagagag

SEQ ID NO: 5409 - RNA, 17 nt, Homo sapiens
gagaggacaaaucuuug

SEQ ID NO: 5410 - RNA, 17 nt, Homo sapiens
gacaaaucuuuguuguu

SEQ ID NO: 5411 - RNA, 17 nt, Homo sapiens
uguuguuccucuucuuu

SEQ ID NO: 5412 - RNA, 17 nt, Homo sapiens
guuguuccucuucuuua

SEQ ID NO: 5413 - RNA, 17 nt, Homo sapiens
uguuccucuucuuuaca

SEQ ID NO: 5414 - RNA, 17 nt, Homo sapiens
uccucuucuuuacacau

SEQ ID NO: 5415 - RNA, 17 nt, Homo sapiens
uucuuuacacauacgca

SEQ ID NO: 5416 - RNA, 17 nt, Homo sapiens
cuuuacacauacgcaaa

SEQ ID NO: 5417 - RNA, 17 nt, Homo sapiens
acauacgcaaaccaccu

SEQ ID NO: 5418 - RNA, 17 nt, Homo sapiens
acgcaaaccaccuguga

SEQ ID NO: 5419 - RNA, 17 nt, Homo sapiens
cgcaaaccaccugugac

SEQ ID NO: 5420 - RNA, 17 nt, Homo sapiens
caaaccaccugugacag

SEQ ID NO: 5421 - RNA, 17 nt, Homo sapiens
aaaccaccugugacagc

SEQ ID NO: 5422 - RNA, 17 nt, Homo sapiens
ccugugacagcuggcaa

SEQ ID NO: 5423 - RNA, 17 nt, Homo sapiens
gugacagcuggcaauuu

SEQ ID NO: 5424 - RNA, 17 nt, Homo sapiens
cagcuggcaauuuuaua

SEQ ID NO: 5425 - RNA, 17 nt, Homo sapiens
uauaaaucagguaacug

SEQ ID NO: 5426 - RNA, 17 nt, Homo sapiens
cagguaacuggaaggag

SEQ ID NO: 5427 - RNA, 17 nt, Homo sapiens
gguuaaacucagaaaaa

SEQ ID NO: 5428 - RNA, 17 nt, Homo sapiens
uuaaacucagaaaaaag

SEQ ID NO: 5429 - RNA, 17 nt, Homo sapiens
aagaagaccucagucaa

SEQ ID NO: 5430 - RNA, 17 nt, Homo sapiens
agaagaccucagucaau

SEQ ID NO: 5431 - RNA, 17 nt, Homo sapiens
aagaccucagucaauuc

SEQ ID NO: 5432 - RNA, 17 nt, Homo sapiens
ccucagucaauucucua

SEQ ID NO: 5433 - RNA, 17 nt, Homo sapiens
gucaauucucuacuuuu

SEQ ID NO: 5434 - RNA, 17 nt, Homo sapiens
caauucucuacuuuuuu

SEQ ID NO: 5435 - RNA, 17 nt, Homo sapiens
uucucuacuuuuuuuuu

SEQ ID NO: 5436 - RNA, 17 nt, Homo sapiens
uuuuuuuccaaaucaga

SEQ ID NO: 5437 - RNA, 17 nt, Homo sapiens
uuuuuuccaaaucagau

SEQ ID NO: 5438 - RNA, 17 nt, Homo sapiens
uccaaaucagauaauag

SEQ ID NO: 5439 - RNA, 17 nt, Homo sapiens
auaauagcccagcaaau

SEQ ID NO: 5440 - RNA, 17 nt, Homo sapiens
uaauagcccagcaaaua

SEQ ID NO: 5441 - RNA, 17 nt, Homo sapiens
aauagcccagcaaauag

SEQ ID NO: 5442 - RNA, 17 nt, Homo sapiens
agcccagcaaauaguga

SEQ ID NO: 5443 - RNA, 17 nt, Homo sapiens
gugauaacaaauaaaac

SEQ ID NO: 5444 - RNA, 17 nt, Homo sapiens
aauaaaaccuuagcugu

SEQ ID NO: 5445 - RNA, 17 nt, Homo sapiens
auaaaaccuuagcuguu

SEQ ID NO: 5446 - RNA, 17 nt, Homo sapiens
accuuagcuguucaugu

SEQ ID NO: 5447 - RNA, 17 nt, Homo sapiens
agcuguucaugucuuga

SEQ ID NO: 5448 - RNA, 17 nt, Homo sapiens
uucaugucuugauuuca

SEQ ID NO: 5449 - RNA, 17 nt, Homo sapiens
uugauuucaauaauuaa

SEQ ID NO: 5450 - RNA, 17 nt, Homo sapiens
auuaauucuuaaucauu

SEQ ID NO: 5451 - RNA, 17 nt, Homo sapiens
ucuuaaucauuaagaga

SEQ ID NO: 5452 - RNA, 17 nt, Homo sapiens
uaagagaccauaauaaa

SEQ ID NO: 5453 - RNA, 17 nt, Homo sapiens
aagagaccauaauaaau

SEQ ID NO: 5454 - RNA, 17 nt, Homo sapiens
auaaauacuccuuuuca

SEQ ID NO: 5455 - RNA, 17 nt, Homo sapiens
aaauacuccuuuucaag

SEQ ID NO: 5456 - RNA, 17 nt, Homo sapiens
aauacuccuuuucaaga

SEQ ID NO: 5457 - RNA, 17 nt, Homo sapiens
uccuuuucaagagaaaa

SEQ ID NO: 5458 - RNA, 17 nt, Homo sapiens
agaaaagcaaaaccauu

SEQ ID NO: 5459 - RNA, 17 nt, Homo sapiens
agcaaaaccauuagaau

SEQ ID NO: 5460 - RNA, 17 nt, Homo sapiens
gcaaaaccauuagaauu

SEQ ID NO: 5461 - RNA, 17 nt, Homo sapiens
auuguuacucagcuccu

SEQ ID NO: 5462 - RNA, 17 nt, Homo sapiens
uguuacucagcuccuuc

SEQ ID NO: 5463 - RNA, 17 nt, Homo sapiens
uacucagcuccuucaaa

SEQ ID NO: 5464 - RNA, 17 nt, Homo sapiens
cucagcuccuucaaacu

SEQ ID NO: 5465 - RNA, 17 nt, Homo sapiens
ucagcuccuucaaacuc

SEQ ID NO: 5466 - RNA, 17 nt, Homo sapiens
gcuccuucaaacucagg

SEQ ID NO: 5467 - RNA, 17 nt, Homo sapiens
cuucaaacucagguuug

SEQ ID NO: 5468 - RNA, 17 nt, Homo sapiens
ucaaacucagguuugua

SEQ ID NO: 5469 - RNA, 17 nt, Homo sapiens
uuuguagcauacaugag

SEQ ID NO: 5470 - RNA, 17 nt, Homo sapiens
uagcauacaugagucca

SEQ ID NO: 5471 - RNA, 17 nt, Homo sapiens
caugaguccauccauca

SEQ ID NO: 5472 - RNA, 17 nt, Homo sapiens
augaguccauccaucag

SEQ ID NO: 5473 - RNA, 17 nt, Homo sapiens
aguccauccaucaguca

SEQ ID NO: 5474 - RNA, 17 nt, Homo sapiens
guccauccaucagucaa

SEQ ID NO: 5475 - RNA, 17 nt, Homo sapiens
cauccaucagucaaaga

SEQ ID NO: 5476 - RNA, 17 nt, Homo sapiens
caucagucaaagaaugg

SEQ ID NO: 5477 - RNA, 17 nt, Homo sapiens
aaugguuccaucuggag

SEQ ID NO: 5478 - RNA, 17 nt, Homo sapiens
augguuccaucuggagu

SEQ ID NO: 5479 - RNA, 17 nt, Homo sapiens
guuccaucuggagucuu

SEQ ID NO: 5480 - RNA, 17 nt, Homo sapiens
cuggagucuuaauguag

SEQ ID NO: 5481 - RNA, 17 nt, Homo sapiens
auggagacuuguaauaa

SEQ ID NO: 5482 - RNA, 17 nt, Homo sapiens
uaaugagcuaguuacaa

SEQ ID NO: 5483 - RNA, 17 nt, Homo sapiens
cuaguuacaaagugcuu

SEQ ID NO: 5484 - RNA, 17 nt, Homo sapiens
caaagugcuuguucauu

SEQ ID NO: 5485 - RNA, 17 nt, Homo sapiens
gcuuguucauuaaaaua

SEQ ID NO: 5486 - RNA, 17 nt, Homo sapiens
aaaauagcacugaaaau

SEQ ID NO: 5487 - RNA, 17 nt, Homo sapiens
aauagcacugaaaauug

SEQ ID NO: 5488 - RNA, 17 nt, Homo sapiens
auugaaacaugaauuaa

SEQ ID NO: 5489 - RNA, 17 nt, Homo sapiens
gaauuaacugauaauau

SEQ ID NO: 5490 - RNA, 17 nt, Homo sapiens
uaauauuccaaucauuu

SEQ ID NO: 5491 - RNA, 17 nt, Homo sapiens
aauauuccaaucauuug

SEQ ID NO: 5492 - RNA, 17 nt, Homo sapiens
uuccaaucauuugccau

SEQ ID NO: 5493 - RNA, 17 nt, Homo sapiens
ucauuugccauuuauga

SEQ ID NO: 5494 - RNA, 17 nt, Homo sapiens
cauuugccauuuaugac

SEQ ID NO: 5495 - RNA, 17 nt, Homo sapiens
uuuaugacaaaaauggu

SEQ ID NO: 5496 - RNA, 17 nt, Homo sapiens
ugguuggcacuaacaaa

SEQ ID NO: 5497 - RNA, 17 nt, Homo sapiens
guuggcacuaacaaaga

SEQ ID NO: 5498 - RNA, 17 nt, Homo sapiens
gcacuaacaaagaacga

SEQ ID NO: 5499 - RNA, 17 nt, Homo sapiens
gaacgagcacuuccuuu

SEQ ID NO: 5500 - RNA, 17 nt, Homo sapiens
acgagcacuuccuuuca

SEQ ID NO: 5501 - RNA, 17 nt, Homo sapiens
agcacuuccuuucagag

SEQ ID NO: 5502 - RNA, 17 nt, Homo sapiens
gcacuuccuuucagagu

SEQ ID NO: 5503 - RNA, 17 nt, Homo sapiens
uuccuuucagaguuucu

SEQ ID NO: 5504 - RNA, 17 nt, Homo sapiens
agaguuucugagauaau

SEQ ID NO: 5505 - RNA, 17 nt, Homo sapiens
cguggaacagucugggu

SEQ ID NO: 5506 - RNA, 17 nt, Homo sapiens
gaacagucuggguggaa

SEQ ID NO: 5507 - RNA, 17 nt, Homo sapiens
aauggggcugaaaccau

SEQ ID NO: 5508 - RNA, 17 nt, Homo sapiens
gcugaaaccaugugcaa

SEQ ID NO: 5509 - RNA, 17 nt, Homo sapiens
cugaaaccaugugcaag

SEQ ID NO: 5510 - RNA, 17 nt, Homo sapiens
ccaugugcaagucugug

SEQ ID NO: 5511 - RNA, 17 nt, Homo sapiens
ugcaagucugugucuug

SEQ ID NO: 5512 - RNA, 17 nt, Homo sapiens
ucugugucuugucaguc

SEQ ID NO: 5513 - RNA, 17 nt, Homo sapiens
gucuugucaguccaaga

SEQ ID NO: 5514 - RNA, 17 nt, Homo sapiens
ugucaguccaagaagug

SEQ ID NO: 5515 - RNA, 17 nt, Homo sapiens
gucaguccaagaaguga

SEQ ID NO: 5516 - RNA, 17 nt, Homo sapiens
gaagugacaccgagaug

SEQ ID NO: 5517 - RNA, 17 nt, Homo sapiens
agugacaccgagauguu

SEQ ID NO: 5518 - RNA, 17 nt, Homo sapiens
uuagggacccgugccuu

SEQ ID NO: 5519 - RNA, 17 nt, Homo sapiens
uagggacccgugccuug

SEQ ID NO: 5520 - RNA, 17 nt, Homo sapiens
acccgugccuuguuucc

SEQ ID NO: 5521 - RNA, 17 nt, Homo sapiens
cccgugccuuguuuccu

SEQ ID NO: 5522 - RNA, 17 nt, Homo sapiens
cuuguuuccuagcccac

SEQ ID NO: 5523 - RNA, 17 nt, Homo sapiens
uuguuuccuagcccaca

SEQ ID NO: 5524 - RNA, 17 nt, Homo sapiens
uuccuagcccacaagaa

SEQ ID NO: 5525 - RNA, 17 nt, Homo sapiens
uccuagcccacaagaau

SEQ ID NO: 5526 - RNA, 17 nt, Homo sapiens
ccuagcccacaagaaug

SEQ ID NO: 5527 - RNA, 17 nt, Homo sapiens
uagcccacaagaaugca

SEQ ID NO: 5528 - RNA, 17 nt, Homo sapiens
aagaaugcaaacaucaa

SEQ ID NO: 5529 - RNA, 17 nt, Homo sapiens
augcaaacaucaaacag

SEQ ID NO: 5530 - RNA, 17 nt, Homo sapiens
caaacaucaaacagaua

SEQ ID NO: 5531 - RNA, 17 nt, Homo sapiens
caucaaacagauacucg

SEQ ID NO: 5532 - RNA, 17 nt, Homo sapiens
acagauacucgcuagcc

SEQ ID NO: 5533 - RNA, 17 nt, Homo sapiens
auacucgcuagccucau

SEQ ID NO: 5534 - RNA, 17 nt, Homo sapiens
ucgcuagccucauuuaa

SEQ ID NO: 5535 - RNA, 17 nt, Homo sapiens
cgcuagccucauuuaaa

SEQ ID NO: 5536 - RNA, 17 nt, Homo sapiens
cuagccucauuuaaauu

SEQ ID NO: 5537 - RNA, 17 nt, Homo sapiens
aggagugcaucuuuggc

SEQ ID NO: 5538 - RNA, 17 nt, Homo sapiens
agugcaucuuuggccga

SEQ ID NO: 5539 - RNA, 17 nt, Homo sapiens
ucuuuggccgacagugg

SEQ ID NO: 5540 - RNA, 17 nt, Homo sapiens
uggccgacaguggugua

SEQ ID NO: 5541 - RNA, 17 nt, Homo sapiens
gguguaacugugugugu

SEQ ID NO: 5542 - RNA, 17 nt, Homo sapiens
uuuugugcauaacuauu

SEQ ID NO: 5543 - RNA, 17 nt, Homo sapiens
ugcauaacuauuuaagg

SEQ ID NO: 5544 - RNA, 17 nt, Homo sapiens
aaggaaacuggaauuuu

SEQ ID NO: 5545 - RNA, 17 nt, Homo sapiens
aaaguuacuuuuauaca

SEQ ID NO: 5546 - RNA, 17 nt, Homo sapiens
uuuuauacaaaccaaga

SEQ ID NO: 5547 - RNA, 17 nt, Homo sapiens
auacaaaccaagaauau

SEQ ID NO: 5548 - RNA, 17 nt, Homo sapiens
uacaaaccaagaauaua

SEQ ID NO: 5549 - RNA, 17 nt, Homo sapiens
auauaugcuacagauau

SEQ ID NO: 5550 - RNA, 17 nt, Homo sapiens
uaugcuacagauauaag

SEQ ID NO: 5551 - RNA, 17 nt, Homo sapiens
uauaagacagacauggu

SEQ ID NO: 5552 - RNA, 17 nt, Homo sapiens
agacagacaugguuugg

SEQ ID NO: 5553 - RNA, 17 nt, Homo sapiens
guuugguccuauauuuc

SEQ ID NO: 5554 - RNA, 17 nt, Homo sapiens
uuugguccuauauuucu

SEQ ID NO: 5555 - RNA, 17 nt, Homo sapiens
uauauuucuagucauga

SEQ ID NO: 5556 - RNA, 17 nt, Homo sapiens
uucuagucaugaugaau

SEQ ID NO: 5557 - RNA, 17 nt, Homo sapiens
uuguauaccaucuucau

SEQ ID NO: 5558 - RNA, 17 nt, Homo sapiens
uguauaccaucuucaua

SEQ ID NO: 5559 - RNA, 17 nt, Homo sapiens
auaccaucuucauauaa

SEQ ID NO: 5560 - RNA, 17 nt, Homo sapiens
ccaucuucauauaauau

SEQ ID NO: 5561 - RNA, 17 nt, Homo sapiens
uaauauacuuaaaaaua

SEQ ID NO: 5562 - RNA, 17 nt, Homo sapiens
aauauuucuuaauuggg

SEQ ID NO: 5563 - RNA, 17 nt, Homo sapiens
aaucguaccaacuuaau

SEQ ID NO: 5564 - RNA, 17 nt, Homo sapiens
aucguaccaacuuaauu

SEQ ID NO: 5565 - RNA, 17 nt, Homo sapiens
guaccaacuuaauugau

SEQ ID NO: 5566 - RNA, 17 nt, Homo sapiens
ugauaaacuuggcaacu

SEQ ID NO: 5567 - RNA, 17 nt, Homo sapiens
aacuuggcaacugcuuu

SEQ ID NO: 5568 - RNA, 17 nt, Homo sapiens
uuggcaacugcuuuuau

SEQ ID NO: 5569 - RNA, 17 nt, Homo sapiens
gcaacugcuuuuauguu

SEQ ID NO: 5570 - RNA, 17 nt, Homo sapiens
uuauguucugucuccuu

SEQ ID NO: 5571 - RNA, 17 nt, Homo sapiens
guucugucuccuuccau

SEQ ID NO: 5572 - RNA, 17 nt, Homo sapiens
ucugucuccuuccauaa

SEQ ID NO: 5573 - RNA, 17 nt, Homo sapiens
cugucuccuuccauaaa

SEQ ID NO: 5574 - RNA, 17 nt, Homo sapiens
ucuccuuccauaaauuu

SEQ ID NO: 5575 - RNA, 17 nt, Homo sapiens
cuccuuccauaaauuuu

SEQ ID NO: 5576 - RNA, 17 nt, Homo sapiens
aauuuuucaaaauacua

SEQ ID NO: 5577 - RNA, 17 nt, Homo sapiens
caaaauacuaauucaac

SEQ ID NO: 5578 - RNA, 17 nt, Homo sapiens
acuaauucaacaaagaa

SEQ ID NO: 5579 - RNA, 17 nt, Homo sapiens
aauucaacaaagaaaaa

SEQ ID NO: 5580 - RNA, 17 nt, Homo sapiens
gaaaaagcucuuuuuuu

SEQ ID NO: 5581 - RNA, 17 nt, Homo sapiens
aaaagcucuuuuuuuuc

SEQ ID NO: 5582 - RNA, 17 nt, Homo sapiens
uuuuuuuccuaaaauaa

SEQ ID NO: 5583 - RNA, 17 nt, Homo sapiens
uuuuuuccuaaaauaaa

SEQ ID NO: 5584 - RNA, 17 nt, Homo sapiens
aaauaaacucaaauuua

SEQ ID NO: 5585 - RNA, 17 nt, Homo sapiens
auaaacucaaauuuauc

SEQ ID NO: 5586 - RNA, 17 nt, Homo sapiens
aauuuauccuuguuuag

SEQ ID NO: 5587 - RNA, 17 nt, Homo sapiens
auuuauccuuguuuaga

SEQ ID NO: 5588 - RNA, 17 nt, Homo sapiens
uuuagagcagagaaaaa

SEQ ID NO: 5589 - RNA, 17 nt, Homo sapiens
agaaaaacuuugaaaug

SEQ ID NO: 5590 - RNA, 17 nt, Homo sapiens
aaauggucucaaaaaau

SEQ ID NO: 5591 - RNA, 17 nt, Homo sapiens
auggucucaaaaaauug

SEQ ID NO: 5592 - RNA, 17 nt, Homo sapiens
aaaauugcuaaauauuu

SEQ ID NO: 5593 - RNA, 17 nt, Homo sapiens
auauuuucaauggaaaa

SEQ ID NO: 5594 - RNA, 17 nt, Homo sapiens
uggaaaacuaaauguua

SEQ ID NO: 5595 - RNA, 17 nt, Homo sapiens
aguuuagcugauuguau

SEQ ID NO: 5596 - RNA, 17 nt, Homo sapiens
uuucgaaccuuucacuu

SEQ ID NO: 5597 - RNA, 17 nt, Homo sapiens
uucgaaccuuucacuuu

SEQ ID NO: 5598 - RNA, 17 nt, Homo sapiens
aaccuuucacuuuuugu

SEQ ID NO: 5599 - RNA, 17 nt, Homo sapiens
ccuuucacuuuuuguuu

SEQ ID NO: 5600 - RNA, 17 nt, Homo sapiens
uguuuuaccuauuucac

SEQ ID NO: 5601 - RNA, 17 nt, Homo sapiens
guuuuaccuauuucaca

SEQ ID NO: 5602 - RNA, 17 nt, Homo sapiens
ccuauuucacaacugug

SEQ ID NO: 5603 - RNA, 17 nt, Homo sapiens
uauuucacaacugugua

SEQ ID NO: 5604 - RNA, 17 nt, Homo sapiens
uucacaacuguguaaau

SEQ ID NO: 5605 - RNA, 17 nt, Homo sapiens
uaaauugccaauaauuc

SEQ ID NO: 5606 - RNA, 17 nt, Homo sapiens
aaauugccaauaauucc

SEQ ID NO: 5607 - RNA, 17 nt, Homo sapiens
aauaauuccuguccaug

SEQ ID NO: 5608 - RNA, 17 nt, Homo sapiens
auaauuccuguccauga

SEQ ID NO: 5609 - RNA, 17 nt, Homo sapiens
uuccuguccaugaaaau

SEQ ID NO: 5610 - RNA, 17 nt, Homo sapiens
uccuguccaugaaaaug

SEQ ID NO: 5611 - RNA, 17 nt, Homo sapiens
gaaaaugcaaauuaucc

SEQ ID NO: 5612 - RNA, 17 nt, Homo sapiens
aaauuauccaguguaga

SEQ ID NO: 5613 - RNA, 17 nt, Homo sapiens
aauuauccaguguagau

SEQ ID NO: 5614 - RNA, 17 nt, Homo sapiens
uauuugaccaucacccu

SEQ ID NO: 5615 - RNA, 17 nt, Homo sapiens
auuugaccaucacccua

SEQ ID NO: 5616 - RNA, 17 nt, Homo sapiens
ugaccaucacccuaugg

SEQ ID NO: 5617 - RNA, 17 nt, Homo sapiens
accaucacccuauggau

SEQ ID NO: 5618 - RNA, 17 nt, Homo sapiens
ccaucacccuauggaua

SEQ ID NO: 5619 - RNA, 17 nt, Homo sapiens
caucacccuauggauau

SEQ ID NO: 5620 - RNA, 17 nt, Homo sapiens
auauuggcuaguuuugc

SEQ ID NO: 5621 - RNA, 17 nt, Homo sapiens
aguuuugccuuuauuaa

SEQ ID NO: 5622 - RNA, 17 nt, Homo sapiens
guuuugccuuuauuaag

SEQ ID NO: 5623 - RNA, 17 nt, Homo sapiens
uauuaagcaaauucauu

SEQ ID NO: 5624 - RNA, 17 nt, Homo sapiens
gcaaauucauuucagcc

SEQ ID NO: 5625 - RNA, 17 nt, Homo sapiens
uucauuucagccugaau

SEQ ID NO: 5626 - RNA, 17 nt, Homo sapiens
auuucagccugaauguc

SEQ ID NO: 5627 - RNA, 17 nt, Homo sapiens
uuucagccugaaugucu

SEQ ID NO: 5628 - RNA, 17 nt, Homo sapiens
ugaaugucugccuauau

SEQ ID NO: 5629 - RNA, 17 nt, Homo sapiens
augucugccuauauauu

SEQ ID NO: 5630 - RNA, 17 nt, Homo sapiens
ugucugccuauauauuc

SEQ ID NO: 5631 - RNA, 17 nt, Homo sapiens
auauauucucugcucuu

SEQ ID NO: 5632 - RNA, 17 nt, Homo sapiens
auauucucugcucuuug

SEQ ID NO: 5633 - RNA, 17 nt, Homo sapiens
uucucugcucuuuguau

SEQ ID NO: 5634 - RNA, 17 nt, Homo sapiens
cucugcucuuuguauuc

SEQ ID NO: 5635 - RNA, 17 nt, Homo sapiens
uuguauucuccuuugaa

SEQ ID NO: 5636 - RNA, 17 nt, Homo sapiens
guauucuccuuugaacc

SEQ ID NO: 5637 - RNA, 17 nt, Homo sapiens
uauucuccuuugaaccc

SEQ ID NO: 5638 - RNA, 17 nt, Homo sapiens
cuuugaacccguuaaaa

SEQ ID NO: 5639 - RNA, 17 nt, Homo sapiens
uuugaacccguuaaaac

SEQ ID NO: 5640 - RNA, 17 nt, Homo sapiens
guuaaaacauccugugg

SEQ ID NO: 5641 - RNA, 17 nt, Homo sapiens
aaaacauccuguggcac

SEQ ID NO: 5642 - RNA, 17 nt, Homo sapiens
aaacauccuguggcacu

SEQ ID NO: 5643 - RNA, 16 nt, Homo sapiens
gggcucgggugcagcg

SEQ ID NO: 5644 - RNA, 16 nt, Homo sapiens
gccuggcggcgaggau

SEQ ID NO: 5645 - RNA, 16 nt, Homo sapiens
ggaagugguugucucc

SEQ ID NO: 5646 - RNA, 16 nt, Homo sapiens
ggcuggagccgcgaga

SEQ ID NO: 5647 - RNA, 16 nt, Homo sapiens
cuggagccgcgagacg

SEQ ID NO: 5648 - RNA, 16 nt, Homo sapiens
cgagacgggcgcucag

SEQ ID NO: 5649 - RNA, 16 nt, Homo sapiens
cgcucagggcgcgggg

SEQ ID NO: 5650 - RNA, 16 nt, Homo sapiens
cggcggcggcgaacga

SEQ ID NO: 5651 - RNA, 16 nt, Homo sapiens
ggcggcgaacgagagg

SEQ ID NO: 5652 - RNA, 16 nt, Homo sapiens
ccgggggagcgcgggc

SEQ ID NO: 5653 - RNA, 16 nt, Homo sapiens
ggcaccgggcgagcag

SEQ ID NO: 5654 - RNA, 16 nt, Homo sapiens
cgagcaggccgcgucg

SEQ ID NO: 5655 - RNA, 16 nt, Homo sapiens
aggccgcgucgcgcuc

SEQ ID NO: 5656 - RNA, 16 nt, Homo sapiens
gccgcgucgcgcucac

SEQ ID NO: 5657 - RNA, 16 nt, Homo sapiens
ccgggguccugcugug

SEQ ID NO: 5658 - RNA, 16 nt, Homo sapiens
ggguccugcugugcgc

SEQ ID NO: 5659 - RNA, 16 nt, Homo sapiens
guccugcugugcgcgc

SEQ ID NO: 5660 - RNA, 16 nt, Homo sapiens
ccugcugugcgcgcug

SEQ ID NO: 5661 - RNA, 16 nt, Homo sapiens
ugcugugcgcgcugcu

SEQ ID NO: 5662 - RNA, 16 nt, Homo sapiens
ugugcgcgcugcucag

SEQ ID NO: 5663 - RNA, 16 nt, Homo sapiens
cugcucagcugucugc

SEQ ID NO: 5664 - RNA, 16 nt, Homo sapiens
ucagcugucugcuucu

SEQ ID NO: 5665 - RNA, 16 nt, Homo sapiens
aaaagauccugaacug

SEQ ID NO: 5666 - RNA, 16 nt, Homo sapiens
auccugaacugaguuu

SEQ ID NO: 5667 - RNA, 16 nt, Homo sapiens
agcacaucaugcaagc

SEQ ID NO: 5668 - RNA, 16 nt, Homo sapiens
gccagacacugcaucu

SEQ ID NO: 5669 - RNA, 16 nt, Homo sapiens
caucuccaaugcaggg

SEQ ID NO: 5670 - RNA, 16 nt, Homo sapiens
aauggucuuugccuga

SEQ ID NO: 5671 - RNA, 16 nt, Homo sapiens
gucuuugccugaaaug

SEQ ID NO: 5672 - RNA, 16 nt, Homo sapiens
cugaaauggugaguaa

SEQ ID NO: 5673 - RNA, 16 nt, Homo sapiens
uaaggaaagcgaaagg

SEQ ID NO: 5674 - RNA, 16 nt, Homo sapiens
gcgaaaggcugagcau

SEQ ID NO: 5675 - RNA, 16 nt, Homo sapiens
aacuaaaucugccugu

SEQ ID NO: 5676 - RNA, 16 nt, Homo sapiens
aaaucugccuguggaa

SEQ ID NO: 5677 - RNA, 16 nt, Homo sapiens
aaacaauucugcagua

SEQ ID NO: 5678 - RNA, 16 nt, Homo sapiens
cuuuaaccuugaacac

SEQ ID NO: 5679 - RNA, 16 nt, Homo sapiens
uucuacagcugcaaau

SEQ ID NO: 5680 - RNA, 16 nt, Homo sapiens
auaucuagcuguaccu

SEQ ID NO: 5681 - RNA, 16 nt, Homo sapiens
aacagaaucugcaauc

SEQ ID NO: 5682 - RNA, 16 nt, Homo sapiens
auuuauuagugauaca

SEQ ID NO: 5683 - RNA, 16 nt, Homo sapiens
ucguagagauguacag

SEQ ID NO: 5684 - RNA, 16 nt, Homo sapiens
gauguacagugaaauc

SEQ ID NO: 5685 - RNA, 16 nt, Homo sapiens
ugaaauccccgaaauu

SEQ ID NO: 5686 - RNA, 16 nt, Homo sapiens
uuauacacaugacuga

SEQ ID NO: 5687 - RNA, 16 nt, Homo sapiens
acacaugacugaagga

SEQ ID NO: 5688 - RNA, 16 nt, Homo sapiens
gucauucccugccggg

SEQ ID NO: 5689 - RNA, 16 nt, Homo sapiens
uaacaucacuguuacu

SEQ ID NO: 5690 - RNA, 16 nt, Homo sapiens
guuuccacuugacacu

SEQ ID NO: 5691 - RNA, 16 nt, Homo sapiens
uugacacuuugauccc

SEQ ID NO: 5692 - RNA, 16 nt, Homo sapiens
uuugaucccugaugga

SEQ ID NO: 5693 - RNA, 16 nt, Homo sapiens
gauggaaaacgcauaa

SEQ ID NO: 5694 - RNA, 16 nt, Homo sapiens
cauaucaaaugcaacg

SEQ ID NO: 5695 - RNA, 16 nt, Homo sapiens
uagggcuucugaccug

SEQ ID NO: 5696 - RNA, 16 nt, Homo sapiens
cuucugaccugugaag

SEQ ID NO: 5697 - RNA, 16 nt, Homo sapiens
ucugaccugugaagca

SEQ ID NO: 5698 - RNA, 16 nt, Homo sapiens
augggcauuuguauaa

SEQ ID NO: 5699 - RNA, 16 nt, Homo sapiens
cucacacaucgacaaa

SEQ ID NO: 5700 - RNA, 16 nt, Homo sapiens
aaucauagauguccaa

SEQ ID NO: 5701 - RNA, 16 nt, Homo sapiens
agcacaccacgcccag

SEQ ID NO: 5702 - RNA, 16 nt, Homo sapiens
ccauacucuuguccuc

SEQ ID NO: 5703 - RNA, 16 nt, Homo sapiens
guccucaauuguacug

SEQ ID NO: 5704 - RNA, 16 nt, Homo sapiens
caauuguacugcuacc

SEQ ID NO: 5705 - RNA, 16 nt, Homo sapiens
ccacucccuugaacac

SEQ ID NO: 5706 - RNA, 16 nt, Homo sapiens
ccuugaacacgagagu

SEQ ID NO: 5707 - RNA, 16 nt, Homo sapiens
gaguucaaaugaccug

SEQ ID NO: 5708 - RNA, 16 nt, Homo sapiens
gaguuacccugaugaa

SEQ ID NO: 5709 - RNA, 16 nt, Homo sapiens
uuacccugaugaaaaa

SEQ ID NO: 5710 - RNA, 16 nt, Homo sapiens
uccguaaggcgacgaa

SEQ ID NO: 5711 - RNA, 16 nt, Homo sapiens
guaaggcgacgaauug

SEQ ID NO: 5712 - RNA, 16 nt, Homo sapiens
gcgacgaauugaccaa

SEQ ID NO: 5713 - RNA, 16 nt, Homo sapiens
caauucccaugccaac

SEQ ID NO: 5714 - RNA, 16 nt, Homo sapiens
auucuacaguguucuu

SEQ ID NO: 5715 - RNA, 16 nt, Homo sapiens
ucuuacuauugacaaa

SEQ ID NO: 5716 - RNA, 16 nt, Homo sapiens
uugacaaaaugcagaa

SEQ ID NO: 5717 - RNA, 16 nt, Homo sapiens
cuuuauacuugucgug

SEQ ID NO: 5718 - RNA, 16 nt, Homo sapiens
uacuugucguguaagg

SEQ ID NO: 5719 - RNA, 16 nt, Homo sapiens
auucaaaucuguuaac

SEQ ID NO: 5720 - RNA, 16 nt, Homo sapiens
acaccucagugcauau

SEQ ID NO: 5721 - RNA, 16 nt, Homo sapiens
gcauauauaugauaaa

SEQ ID NO: 5722 - RNA, 16 nt, Homo sapiens
auucaucacugugaaa

SEQ ID NO: 5723 - RNA, 16 nt, Homo sapiens
ucaucacugugaaaca

SEQ ID NO: 5724 - RNA, 16 nt, Homo sapiens
gugaaacaucgaaaac

SEQ ID NO: 5725 - RNA, 16 nt, Homo sapiens
aacagcaggugcuuga

SEQ ID NO: 5726 - RNA, 16 nt, Homo sapiens
gcaggugcuugaaacc

SEQ ID NO: 5727 - RNA, 16 nt, Homo sapiens
ggcucucuaugaaagu

SEQ ID NO: 5728 - RNA, 16 nt, Homo sapiens
cuaugaaagugaaggc

SEQ ID NO: 5729 - RNA, 16 nt, Homo sapiens
cauuucccucgccgga

SEQ ID NO: 5730 - RNA, 16 nt, Homo sapiens
gccggaaguuguaugg

SEQ ID NO: 5731 - RNA, 16 nt, Homo sapiens
uggguuaccugcgacu

SEQ ID NO: 5732 - RNA, 16 nt, Homo sapiens
gguuaccugcgacuga

SEQ ID NO: 5733 - RNA, 16 nt, Homo sapiens
accugcgacugagaaa

SEQ ID NO: 5734 - RNA, 16 nt, Homo sapiens
ugagaaaucugcucgc

SEQ ID NO: 5735 - RNA, 16 nt, Homo sapiens
aaaucugcucgcuauu

SEQ ID NO: 5736 - RNA, 16 nt, Homo sapiens
cucgcuauuugacucg

SEQ ID NO: 5737 - RNA, 16 nt, Homo sapiens
ggacguaacugaagag

SEQ ID NO: 5738 - RNA, 16 nt, Homo sapiens
ugaagaggaugcaggg

SEQ ID NO: 5739 - RNA, 16 nt, Homo sapiens
auacaaucuugcugag

SEQ ID NO: 5740 - RNA, 16 nt, Homo sapiens
caaucuugcugagcau

SEQ ID NO: 5741 - RNA, 16 nt, Homo sapiens
acagucaaauguguuu

SEQ ID NO: 5742 - RNA, 16 nt, Homo sapiens
agucaaauguguuuaa

SEQ ID NO: 5743 - RNA, 16 nt, Homo sapiens
aaaccucacugccacu

SEQ ID NO: 5744 - RNA, 16 nt, Homo sapiens
cacucuaauugucaau

SEQ ID NO: 5745 - RNA, 16 nt, Homo sapiens
aauugucaaugugaaa

SEQ ID NO: 5746 - RNA, 16 nt, Homo sapiens
uugucaaugugaaacc

SEQ ID NO: 5747 - RNA, 16 nt, Homo sapiens
ccagauuuacgaaaag

SEQ ID NO: 5748 - RNA, 16 nt, Homo sapiens
aaaaggccgugucauc

SEQ ID NO: 5749 - RNA, 16 nt, Homo sapiens
gacaaauccugacuug

SEQ ID NO: 5750 - RNA, 16 nt, Homo sapiens
auccugacuuguaccg

SEQ ID NO: 5751 - RNA, 16 nt, Homo sapiens
gacuuguaccgcauau

SEQ ID NO: 5752 - RNA, 16 nt, Homo sapiens
uggcaccccuguaacc

SEQ ID NO: 5753 - RNA, 16 nt, Homo sapiens
uaaucauuccgaagca

SEQ ID NO: 5754 - RNA, 16 nt, Homo sapiens
gaagcaaggugugacu

SEQ ID NO: 5755 - RNA, 16 nt, Homo sapiens
agcaaggugugacuuu

SEQ ID NO: 5756 - RNA, 16 nt, Homo sapiens
ugugacuuuuguucca

SEQ ID NO: 5757 - RNA, 16 nt, Homo sapiens
uuccaauaaugaagag

SEQ ID NO: 5758 - RNA, 16 nt, Homo sapiens
uauccuggaugcugac

SEQ ID NO: 5759 - RNA, 16 nt, Homo sapiens
ccuggaugcugacagc

SEQ ID NO: 5760 - RNA, 16 nt, Homo sapiens
aaacagaauugagagc

SEQ ID NO: 5761 - RNA, 16 nt, Homo sapiens
aucacucagcgcaugg

SEQ ID NO: 5762 - RNA, 16 nt, Homo sapiens
caccuugguuguggcu

SEQ ID NO: 5763 - RNA, 16 nt, Homo sapiens
gguuguggcugacucu

SEQ ID NO: 5764 - RNA, 16 nt, Homo sapiens
aucuacauuugcauag

SEQ ID NO: 5765 - RNA, 16 nt, Homo sapiens
aguugggacuguggga

SEQ ID NO: 5766 - RNA, 16 nt, Homo sapiens
uaucacagaugugcca

SEQ ID NO: 5767 - RNA, 16 nt, Homo sapiens
ucacagaugugccaaa

SEQ ID NO: 5768 - RNA, 16 nt, Homo sapiens
uggguuucauguuaac

SEQ ID NO: 5769 - RNA, 16 nt, Homo sapiens
uggaaaaaaugccgac

SEQ ID NO: 5770 - RNA, 16 nt, Homo sapiens
aaaaaaugccgacgga

SEQ ID NO: 5771 - RNA, 16 nt, Homo sapiens
gagaggaccugaaacu

SEQ ID NO: 5772 - RNA, 16 nt, Homo sapiens
accugaaacugucuug

SEQ ID NO: 5773 - RNA, 16 nt, Homo sapiens
aaacugucuugcacag

SEQ ID NO: 5774 - RNA, 16 nt, Homo sapiens
ggauuuuacugcggac

SEQ ID NO: 5775 - RNA, 16 nt, Homo sapiens
acagaacaaugcacua

SEQ ID NO: 5776 - RNA, 16 nt, Homo sapiens
uuaccaucaugaaugu

SEQ ID NO: 5777 - RNA, 16 nt, Homo sapiens
caucaugaauguuucc

SEQ ID NO: 5778 - RNA, 16 nt, Homo sapiens
auguuucccugcaaga

SEQ ID NO: 5779 - RNA, 16 nt, Homo sapiens
aggcaccuaugccugc

SEQ ID NO: 5780 - RNA, 16 nt, Homo sapiens
accuaugccugcagag

SEQ ID NO: 5781 - RNA, 16 nt, Homo sapiens
agccaggaauguauac

SEQ ID NO: 5782 - RNA, 16 nt, Homo sapiens
cauaccuccugcgaaa

SEQ ID NO: 5783 - RNA, 16 nt, Homo sapiens
uaccuccugcgaaacc

SEQ ID NO: 5784 - RNA, 16 nt, Homo sapiens
aaaccucagugaucac

SEQ ID NO: 5785 - RNA, 16 nt, Homo sapiens
acuuuagacugucaug

SEQ ID NO: 5786 - RNA, 16 nt, Homo sapiens
agacugucaugcuaau

SEQ ID NO: 5787 - RNA, 16 nt, Homo sapiens
ugcuaauggugucccc

SEQ ID NO: 5788 - RNA, 16 nt, Homo sapiens
ugguguccccgagccu

SEQ ID NO: 5789 - RNA, 16 nt, Homo sapiens
gaagcagcacgcuguu

SEQ ID NO: 5790 - RNA, 16 nt, Homo sapiens
gcagcacgcuguuuau

SEQ ID NO: 5791 - RNA, 16 nt, Homo sapiens
gcuguuuauugaaaga

SEQ ID NO: 5792 - RNA, 16 nt, Homo sapiens
agaagaggaugaaggu

SEQ ID NO: 5793 - RNA, 16 nt, Homo sapiens
ggaugaaggugucuau

SEQ ID NO: 5794 - RNA, 16 nt, Homo sapiens
gucuaucacugcaaag

SEQ ID NO: 5795 - RNA, 16 nt, Homo sapiens
gaagggcucuguggaa

SEQ ID NO: 5796 - RNA, 16 nt, Homo sapiens
auaccucacuguucaa

SEQ ID NO: 5797 - RNA, 16 nt, Homo sapiens
aucuggagcugaucac

SEQ ID NO: 5798 - RNA, 16 nt, Homo sapiens
acucuaacaugcaccu

SEQ ID NO: 5799 - RNA, 16 nt, Homo sapiens
acaugcaccugugugg

SEQ ID NO: 5800 - RNA, 16 nt, Homo sapiens
augcaccuguguggcu

SEQ ID NO: 5801 - RNA, 16 nt, Homo sapiens
cuguguggcugcgacu

SEQ ID NO: 5802 - RNA, 16 nt, Homo sapiens
guguggcugcgacucu

SEQ ID NO: 5803 - RNA, 16 nt, Homo sapiens
cuccuuauccgaaaaa

SEQ ID NO: 5804 - RNA, 16 nt, Homo sapiens
uccgaaaaaugaaaag

SEQ ID NO: 5805 - RNA, 16 nt, Homo sapiens
gucuucuucugaaaua

SEQ ID NO: 5806 - RNA, 16 nt, Homo sapiens
aauaaagacugacuac

SEQ ID NO: 5807 - RNA, 16 nt, Homo sapiens
ggacccagaugaaguu

SEQ ID NO: 5808 - RNA, 16 nt, Homo sapiens
uccuuuggaugagcag

SEQ ID NO: 5809 - RNA, 16 nt, Homo sapiens
gaugagcagugugagc

SEQ ID NO: 5810 - RNA, 16 nt, Homo sapiens
ugagcagugugagcgg

SEQ ID NO: 5811 - RNA, 16 nt, Homo sapiens
gcucccuuaugaugcc

SEQ ID NO: 5812 - RNA, 16 nt, Homo sapiens
cccuuaugaugccagc

SEQ ID NO: 5813 - RNA, 16 nt, Homo sapiens
gugggaguuugcccgg

SEQ ID NO: 5814 - RNA, 16 nt, Homo sapiens
ucaccuacgugccgga

SEQ ID NO: 5815 - RNA, 16 nt, Homo sapiens
gugccggacuguggcu

SEQ ID NO: 5816 - RNA, 16 nt, Homo sapiens
gacuguggcugugaaa

SEQ ID NO: 5817 - RNA, 16 nt, Homo sapiens
cuguggcugugaaaau

SEQ ID NO: 5818 - RNA, 16 nt, Homo sapiens
cugugaaaaugcugaa

SEQ ID NO: 5819 - RNA, 16 nt, Homo sapiens
ugaaaaugcugaaaga

SEQ ID NO: 5820 - RNA, 16 nt, Homo sapiens
cacggccagcgaguac

SEQ ID NO: 5821 - RNA, 16 nt, Homo sapiens
acaaagcucugaugac

SEQ ID NO: 5822 - RNA, 16 nt, Homo sapiens
aagcucugaugacuga

SEQ ID NO: 5823 - RNA, 16 nt, Homo sapiens
ucugaugacugagcua

SEQ ID NO: 5824 - RNA, 16 nt, Homo sapiens
uaaaaaucuugaccca

SEQ ID NO: 5825 - RNA, 16 nt, Homo sapiens
gccaccaucugaacgu

SEQ ID NO: 5826 - RNA, 16 nt, Homo sapiens
ugguuaaccugcuggg

SEQ ID NO: 5827 - RNA, 16 nt, Homo sapiens
cugggagccugcacca

SEQ ID NO: 5828 - RNA, 16 nt, Homo sapiens
gagggccucugauggu

SEQ ID NO: 5829 - RNA, 16 nt, Homo sapiens
cucugauggugauugu

SEQ ID NO: 5830 - RNA, 16 nt, Homo sapiens
gauggugauuguugaa

SEQ ID NO: 5831 - RNA, 16 nt, Homo sapiens
ggugauuguugaauac

SEQ ID NO: 5832 - RNA, 16 nt, Homo sapiens
guugaauacugcaaau

SEQ ID NO: 5833 - RNA, 16 nt, Homo sapiens
gagcaaacgugacuua

SEQ ID NO: 5834 - RNA, 16 nt, Homo sapiens
caacaaggaugcagca

SEQ ID NO: 5835 - RNA, 16 nt, Homo sapiens
caccagcagcgaaagc

SEQ ID NO: 5836 - RNA, 16 nt, Homo sapiens
cgaaagcuuugcgagc

SEQ ID NO: 5837 - RNA, 16 nt, Homo sapiens
aaagcuuugcgagcuc

SEQ ID NO: 5838 - RNA, 16 nt, Homo sapiens
auaaaagucugaguga

SEQ ID NO: 5839 - RNA, 16 nt, Homo sapiens
aagucugagugauguu

SEQ ID NO: 5840 - RNA, 16 nt, Homo sapiens
ucugagugauguugag

SEQ ID NO: 5841 - RNA, 16 nt, Homo sapiens
gagugauguugaggaa

SEQ ID NO: 5842 - RNA, 16 nt, Homo sapiens
ggaggauucugacggu

SEQ ID NO: 5843 - RNA, 16 nt, Homo sapiens
uggaagaucugauuuc

SEQ ID NO: 5844 - RNA, 16 nt, Homo sapiens
uggaguuccugucuuc

SEQ ID NO: 5845 - RNA, 16 nt, Homo sapiens
uccagaaagugcauuc

SEQ ID NO: 5846 - RNA, 16 nt, Homo sapiens
accuggcagcgagaaa

SEQ ID NO: 5847 - RNA, 16 nt, Homo sapiens
ucuuuuaucugagaac

SEQ ID NO: 5848 - RNA, 16 nt, Homo sapiens
acaacguggugaagau

SEQ ID NO: 5849 - RNA, 16 nt, Homo sapiens
gugaagauuugugauu

SEQ ID NO: 5850 - RNA, 16 nt, Homo sapiens
gaagauuugugauuuu

SEQ ID NO: 5851 - RNA, 16 nt, Homo sapiens
uuuuggccuugcccgg

SEQ ID NO: 5852 - RNA, 16 nt, Homo sapiens
uaagaaccccgauuau

SEQ ID NO: 5853 - RNA, 16 nt, Homo sapiens
ccccgauuaugugaga

SEQ ID NO: 5854 - RNA, 16 nt, Homo sapiens
ccgauuaugugagaaa

SEQ ID NO: 5855 - RNA, 16 nt, Homo sapiens
ggagauacucgacuuc

SEQ ID NO: 5856 - RNA, 16 nt, Homo sapiens
gacuuccucugaaaug

SEQ ID NO: 5857 - RNA, 16 nt, Homo sapiens
gauggcucccgaaucu

SEQ ID NO: 5858 - RNA, 16 nt, Homo sapiens
aucuaucuuugacaaa

SEQ ID NO: 5859 - RNA, 16 nt, Homo sapiens
caccaagagcgacgug

SEQ ID NO: 5860 - RNA, 16 nt, Homo sapiens
agagcgacgugugguc

SEQ ID NO: 5861 - RNA, 16 nt, Homo sapiens
acggaguauugcugug

SEQ ID NO: 5862 - RNA, 16 nt, Homo sapiens
gaguauugcuguggga

SEQ ID NO: 5863 - RNA, 16 nt, Homo sapiens
acaaauggaugaggac

SEQ ID NO: 5864 - RNA, 16 nt, Homo sapiens
gaggacuuuugcaguc

SEQ ID NO: 5865 - RNA, 16 nt, Homo sapiens
uuuugcagucgccuga

SEQ ID NO: 5866 - RNA, 16 nt, Homo sapiens
gcagucgccugaggga

SEQ ID NO: 5867 - RNA, 16 nt, Homo sapiens
gggaaggcaugaggau

SEQ ID NO: 5868 - RNA, 16 nt, Homo sapiens
gcaugaggaugagagc

SEQ ID NO: 5869 - RNA, 16 nt, Homo sapiens
gagagcuccugaguac

SEQ ID NO: 5870 - RNA, 16 nt, Homo sapiens
cucuacuccugaaauc

SEQ ID NO: 5871 - RNA, 16 nt, Homo sapiens
aucagaucaugcugga

SEQ ID NO: 5872 - RNA, 16 nt, Homo sapiens
augcuggacugcuggc

SEQ ID NO: 5873 - RNA, 16 nt, Homo sapiens
gccaagauuugcagaa

SEQ ID NO: 5874 - RNA, 16 nt, Homo sapiens
ugcagaacuuguggaa

SEQ ID NO: 5875 - RNA, 16 nt, Homo sapiens
aaaacuaggugauuug

SEQ ID NO: 5876 - RNA, 16 nt, Homo sapiens
uaggugauuugcuuca

SEQ ID NO: 5877 - RNA, 16 nt, Homo sapiens
ucaagcaaauguacaa

SEQ ID NO: 5878 - RNA, 16 nt, Homo sapiens
cccaaucaaugccaua

SEQ ID NO: 5879 - RNA, 16 nt, Homo sapiens
augccauacugacagg

SEQ ID NO: 5880 - RNA, 16 nt, Homo sapiens
cucaacuccugccuuc

SEQ ID NO: 5881 - RNA, 16 nt, Homo sapiens
ugccuucucugaggac

SEQ ID NO: 5882 - RNA, 16 nt, Homo sapiens
uuucagcuccgaaguu

SEQ ID NO: 5883 - RNA, 16 nt, Homo sapiens
aggaagcucugaugau

SEQ ID NO: 5884 - RNA, 16 nt, Homo sapiens
aagcucugaugauguc

SEQ ID NO: 5885 - RNA, 16 nt, Homo sapiens
cucugaugaugucaga

SEQ ID NO: 5886 - RNA, 16 nt, Homo sapiens
ugucagauauguaaau

SEQ ID NO: 5887 - RNA, 16 nt, Homo sapiens
auauguaaaugcuuuc

SEQ ID NO: 5888 - RNA, 16 nt, Homo sapiens
ucaaguucaugagccu

SEQ ID NO: 5889 - RNA, 16 nt, Homo sapiens
caaaaccuuugaagaa

SEQ ID NO: 5890 - RNA, 16 nt, Homo sapiens
aacuuuuaccgaaugc

SEQ ID NO: 5891 - RNA, 16 nt, Homo sapiens
uuuaccgaaugccacc

SEQ ID NO: 5892 - RNA, 16 nt, Homo sapiens
ccaccuccauguuuga

SEQ ID NO: 5893 - RNA, 16 nt, Homo sapiens
cuccauguuugaugac

SEQ ID NO: 5894 - RNA, 16 nt, Homo sapiens
cauguuugaugacuac

SEQ ID NO: 5895 - RNA, 16 nt, Homo sapiens
cuaccagggcgacagc

SEQ ID NO: 5896 - RNA, 16 nt, Homo sapiens
gcagcacucuguuggc

SEQ ID NO: 5897 - RNA, 16 nt, Homo sapiens
ccucucccaugcugaa

SEQ ID NO: 5898 - RNA, 16 nt, Homo sapiens
cucccaugcugaagcg

SEQ ID NO: 5899 - RNA, 16 nt, Homo sapiens
augcugaagcgcuuca

SEQ ID NO: 5900 - RNA, 16 nt, Homo sapiens
caccuggacugacagc

SEQ ID NO: 5901 - RNA, 16 nt, Homo sapiens
ccaaggccucgcucaa

SEQ ID NO: 5902 - RNA, 16 nt, Homo sapiens
gcucaagauugacuug

SEQ ID NO: 5903 - RNA, 16 nt, Homo sapiens
agauugacuugagagu

SEQ ID NO: 5904 - RNA, 16 nt, Homo sapiens
agucggggcugucuga

SEQ ID NO: 5905 - RNA, 16 nt, Homo sapiens
ggggcugucugauguc

SEQ ID NO: 5906 - RNA, 16 nt, Homo sapiens
gcugucugaugucagc

SEQ ID NO: 5907 - RNA, 16 nt, Homo sapiens
cccaguuucugccauu

SEQ ID NO: 5908 - RNA, 16 nt, Homo sapiens
cauuccagcugugggc

SEQ ID NO: 5909 - RNA, 16 nt, Homo sapiens
gcacgucagcgaaggc

SEQ ID NO: 5910 - RNA, 16 nt, Homo sapiens
gaaggcaagcgcaggu

SEQ ID NO: 5911 - RNA, 16 nt, Homo sapiens
guucaccuacgaccac

SEQ ID NO: 5912 - RNA, 16 nt, Homo sapiens
cuacgaccacgcugag

SEQ ID NO: 5913 - RNA, 16 nt, Homo sapiens
cgaccacgcugagcug

SEQ ID NO: 5914 - RNA, 16 nt, Homo sapiens
aaggaaaaucgcgugc

SEQ ID NO: 5915 - RNA, 16 nt, Homo sapiens
aaaaucgcgugcugcu

SEQ ID NO: 5916 - RNA, 16 nt, Homo sapiens
aucgcgugcugcuccc

SEQ ID NO: 5917 - RNA, 16 nt, Homo sapiens
gcugcuccccgccccc

SEQ ID NO: 5918 - RNA, 16 nt, Homo sapiens
cggugguccuguacuc

SEQ ID NO: 5919 - RNA, 16 nt, Homo sapiens
ucuagaguuugacacg

SEQ ID NO: 5920 - RNA, 16 nt, Homo sapiens
aguuugacacgaagcc

SEQ ID NO: 5921 - RNA, 16 nt, Homo sapiens
agaagcacauguguau

SEQ ID NO: 5922 - RNA, 16 nt, Homo sapiens
aagcacauguguauuu

SEQ ID NO: 5923 - RNA, 16 nt, Homo sapiens
acuagcuuuugccagu

SEQ ID NO: 5924 - RNA, 16 nt, Homo sapiens
ccaguauuaugcauau

SEQ ID NO: 5925 - RNA, 16 nt, Homo sapiens
ggagccagcugcuuuu

SEQ ID NO: 5926 - RNA, 16 nt, Homo sapiens
gcugcuuuuugugauu

SEQ ID NO: 5927 - RNA, 16 nt, Homo sapiens
ugcuuuuugugauuuu

SEQ ID NO: 5928 - RNA, 16 nt, Homo sapiens
uuuuaauagugcuuuu

SEQ ID NO: 5929 - RNA, 16 nt, Homo sapiens
uuuuuuuuuugacuaa

SEQ ID NO: 5930 - RNA, 16 nt, Homo sapiens
uaacaagaauguaacu

SEQ ID NO: 5931 - RNA, 16 nt, Homo sapiens
gagaaauagugacaag

SEQ ID NO: 5932 - RNA, 16 nt, Homo sapiens
agugacaagugaagaa

SEQ ID NO: 5933 - RNA, 16 nt, Homo sapiens
gaacacuacugcuaaa

SEQ ID NO: 5934 - RNA, 16 nt, Homo sapiens
aaauccucauguuacu

SEQ ID NO: 5935 - RNA, 16 nt, Homo sapiens
guuacucaguguuaga

SEQ ID NO: 5936 - RNA, 16 nt, Homo sapiens
uaaacccaaugacuuc

SEQ ID NO: 5937 - RNA, 16 nt, Homo sapiens
ugacuucccugcucca

SEQ ID NO: 5938 - RNA, 16 nt, Homo sapiens
uccaacccccgccacc

SEQ ID NO: 5939 - RNA, 16 nt, Homo sapiens
cucagggcacgcagga

SEQ ID NO: 5940 - RNA, 16 nt, Homo sapiens
ggaccaguuugauuga

SEQ ID NO: 5941 - RNA, 16 nt, Homo sapiens
caguuugauugaggag

SEQ ID NO: 5942 - RNA, 16 nt, Homo sapiens
uugaggagcugcacug

SEQ ID NO: 5943 - RNA, 16 nt, Homo sapiens
gagcugcacugaucac

SEQ ID NO: 5944 - RNA, 16 nt, Homo sapiens
aucacccaaugcauca

SEQ ID NO: 5945 - RNA, 16 nt, Homo sapiens
ggccagcccugcagcc

SEQ ID NO: 5946 - RNA, 16 nt, Homo sapiens
uggcuggccugagcaa

SEQ ID NO: 5947 - RNA, 16 nt, Homo sapiens
ccuaagacaugugagg

SEQ ID NO: 5948 - RNA, 16 nt, Homo sapiens
uaagacaugugaggag

SEQ ID NO: 5949 - RNA, 16 nt, Homo sapiens
gagaaggcaugagaaa

SEQ ID NO: 5950 - RNA, 16 nt, Homo sapiens
gaaagaauuugagacg

SEQ ID NO: 5951 - RNA, 16 nt, Homo sapiens
aauuugagacgcacca

SEQ ID NO: 5952 - RNA, 16 nt, Homo sapiens
gacgcaccaugugggc

SEQ ID NO: 5953 - RNA, 16 nt, Homo sapiens
gcucagcaaugccauu

SEQ ID NO: 5954 - RNA, 16 nt, Homo sapiens
ucccagcucugacccu

SEQ ID NO: 5955 - RNA, 16 nt, Homo sapiens
uucuacauuugagggc

SEQ ID NO: 5956 - RNA, 16 nt, Homo sapiens
gauggacagcgaugag

SEQ ID NO: 5957 - RNA, 16 nt, Homo sapiens
ggacagcgaugagggg

SEQ ID NO: 5958 - RNA, 16 nt, Homo sapiens
gugguucuauguccau

SEQ ID NO: 5959 - RNA, 16 nt, Homo sapiens
uucguggcauguuuug

SEQ ID NO: 5960 - RNA, 16 nt, Homo sapiens
ggcauguuuugauuug

SEQ ID NO: 5961 - RNA, 16 nt, Homo sapiens
guuuugauuuguagca

SEQ ID NO: 5962 - RNA, 16 nt, Homo sapiens
uuguagcacugagggu

SEQ ID NO: 5963 - RNA, 16 nt, Homo sapiens
acucaacucugagccc

SEQ ID NO: 5964 - RNA, 16 nt, Homo sapiens
cuaguaagaugcacug

SEQ ID NO: 5965 - RNA, 16 nt, Homo sapiens
aagaugcacugaaaac

SEQ ID NO: 5966 - RNA, 16 nt, Homo sapiens
gaguuagguugucucc

SEQ ID NO: 5967 - RNA, 16 nt, Homo sapiens
uccaggccaugauggc

SEQ ID NO: 5968 - RNA, 16 nt, Homo sapiens
gccuuacacugaaaau

SEQ ID NO: 5969 - RNA, 16 nt, Homo sapiens
cacugaaaaugucaca

SEQ ID NO: 5970 - RNA, 16 nt, Homo sapiens
guauuauucuguuuug

SEQ ID NO: 5971 - RNA, 16 nt, Homo sapiens
auucuguuuugcacag

SEQ ID NO: 5972 - RNA, 16 nt, Homo sapiens
acaguuaguugugaaa

SEQ ID NO: 5973 - RNA, 16 nt, Homo sapiens
aguuaguugugaaaga

SEQ ID NO: 5974 - RNA, 16 nt, Homo sapiens
aaagaaagcugagaag

SEQ ID NO: 5975 - RNA, 16 nt, Homo sapiens
ugagaagaaugaaaau

SEQ ID NO: 5976 - RNA, 16 nt, Homo sapiens
gaaugaaaaugcaguc

SEQ ID NO: 5977 - RNA, 16 nt, Homo sapiens
augcaguccugaggag

SEQ ID NO: 5978 - RNA, 16 nt, Homo sapiens
auaucaaaacgagggc

SEQ ID NO: 5979 - RNA, 16 nt, Homo sapiens
aacgagggcugaugga

SEQ ID NO: 5980 - RNA, 16 nt, Homo sapiens
acacuaaucugaaagg

SEQ ID NO: 5981 - RNA, 16 nt, Homo sapiens
cugaaaggauguggaa

SEQ ID NO: 5982 - RNA, 16 nt, Homo sapiens
auuagcuggcgcauau

SEQ ID NO: 5983 - RNA, 16 nt, Homo sapiens
uaagcuccuugaguaa

SEQ ID NO: 5984 - RNA, 16 nt, Homo sapiens
aaggugguauguaauu

SEQ ID NO: 5985 - RNA, 16 nt, Homo sapiens
uguaauuuaugcaagg

SEQ ID NO: 5986 - RNA, 16 nt, Homo sapiens
auuaguuaaugagcca

SEQ ID NO: 5987 - RNA, 16 nt, Homo sapiens
auuuucaacugcuuug

SEQ ID NO: 5988 - RNA, 16 nt, Homo sapiens
caacugcuuugaaacu

SEQ ID NO: 5989 - RNA, 16 nt, Homo sapiens
uuugaaacuugccugg

SEQ ID NO: 5990 - RNA, 16 nt, Homo sapiens
ccuggggucugagcau

SEQ ID NO: 5991 - RNA, 16 nt, Homo sapiens
gucugagcaugauggg

SEQ ID NO: 5992 - RNA, 16 nt, Homo sapiens
aggaaagggcgccuac

SEQ ID NO: 5993 - RNA, 16 nt, Homo sapiens
gccuuggaucgcuaag

SEQ ID NO: 5994 - RNA, 16 nt, Homo sapiens
agcuggcucuguuuga

SEQ ID NO: 5995 - RNA, 16 nt, Homo sapiens
ggcucuguuugaugcu

SEQ ID NO: 5996 - RNA, 16 nt, Homo sapiens
ucuguuugaugcuauu

SEQ ID NO: 5997 - RNA, 16 nt, Homo sapiens
ugcuauuuaugcaagu

SEQ ID NO: 5998 - RNA, 16 nt, Homo sapiens
uagggucuauguauuu

SEQ ID NO: 5999 - RNA, 16 nt, Homo sapiens
uauuuaggaugcgccu

SEQ ID NO: 6000 - RNA, 16 nt, Homo sapiens
uuuaggaugcgccuac

SEQ ID NO: 6001 - RNA, 16 nt, Homo sapiens
uauuuaggaugucugc

SEQ ID NO: 6002 - RNA, 16 nt, Homo sapiens
uaggaugucugcaccu

SEQ ID NO: 6003 - RNA, 16 nt, Homo sapiens
ugcaccuucugcagcc

SEQ ID NO: 6004 - RNA, 16 nt, Homo sapiens
acaguggauugcugcu

SEQ ID NO: 6005 - RNA, 16 nt, Homo sapiens
guggauugcugcuucu

SEQ ID NO: 6006 - RNA, 16 nt, Homo sapiens
agaagaguaugcuucc

SEQ ID NO: 6007 - RNA, 16 nt, Homo sapiens
uuuuauccauguaauu

SEQ ID NO: 6008 - RNA, 16 nt, Homo sapiens
uaauuuaacuguagaa

SEQ ID NO: 6009 - RNA, 16 nt, Homo sapiens
uguagaaccugagcuc

SEQ ID NO: 6010 - RNA, 16 nt, Homo sapiens
cuaaguaaccgaagaa

SEQ ID NO: 6011 - RNA, 16 nt, Homo sapiens
accgaagaauguaugc

SEQ ID NO: 6012 - RNA, 16 nt, Homo sapiens
aagaauguaugccucu

SEQ ID NO: 6013 - RNA, 16 nt, Homo sapiens
guaugccucuguucuu

SEQ ID NO: 6014 - RNA, 16 nt, Homo sapiens
cuguucuuaugugcca

SEQ ID NO: 6015 - RNA, 16 nt, Homo sapiens
guucuuaugugccaca

SEQ ID NO: 6016 - RNA, 16 nt, Homo sapiens
ccacauccuuguuuaa

SEQ ID NO: 6017 - RNA, 16 nt, Homo sapiens
aaggcucucuguauga

SEQ ID NO: 6018 - RNA, 16 nt, Homo sapiens
cucucuguaugaagag

SEQ ID NO: 6019 - RNA, 16 nt, Homo sapiens
auucccuagugagccu

SEQ ID NO: 6020 - RNA, 16 nt, Homo sapiens
agcggcuuuuguggaa

SEQ ID NO: 6021 - RNA, 16 nt, Homo sapiens
acaaaucuuuguuguu

SEQ ID NO: 6022 - RNA, 16 nt, Homo sapiens
aaucuuuguuguuccu

SEQ ID NO: 6023 - RNA, 16 nt, Homo sapiens
uuacacauacgcaaac

SEQ ID NO: 6024 - RNA, 16 nt, Homo sapiens
caaaccaccugugaca

SEQ ID NO: 6025 - RNA, 16 nt, Homo sapiens
aaccaccugugacagc

SEQ ID NO: 6026 - RNA, 16 nt, Homo sapiens
agcaaauagugauaac

SEQ ID NO: 6027 - RNA, 16 nt, Homo sapiens
aaccuuagcuguucau

SEQ ID NO: 6028 - RNA, 16 nt, Homo sapiens
agcuguucaugucuug

SEQ ID NO: 6029 - RNA, 16 nt, Homo sapiens
uucaugucuugauuuc

SEQ ID NO: 6030 - RNA, 16 nt, Homo sapiens
cauuagaauuguuacu

SEQ ID NO: 6031 - RNA, 16 nt, Homo sapiens
acucagguuuguagca

SEQ ID NO: 6032 - RNA, 16 nt, Homo sapiens
uagcauacaugagucc

SEQ ID NO: 6033 - RNA, 16 nt, Homo sapiens
gagucuuaauguagaa

SEQ ID NO: 6034 - RNA, 16 nt, Homo sapiens
auggagacuuguaaua

SEQ ID NO: 6035 - RNA, 16 nt, Homo sapiens
uuguaauaaugagcua

SEQ ID NO: 6036 - RNA, 16 nt, Homo sapiens
guuacaaagugcuugu

SEQ ID NO: 6037 - RNA, 16 nt, Homo sapiens
caaagugcuuguucau

SEQ ID NO: 6038 - RNA, 16 nt, Homo sapiens
aaauagcacugaaaau

SEQ ID NO: 6039 - RNA, 16 nt, Homo sapiens
acugaaaauugaaaca

SEQ ID NO: 6040 - RNA, 16 nt, Homo sapiens
auugaaacaugaauua

SEQ ID NO: 6041 - RNA, 16 nt, Homo sapiens
ugaauuaacugauaau

SEQ ID NO: 6042 - RNA, 16 nt, Homo sapiens
ccaaucauuugccauu

SEQ ID NO: 6043 - RNA, 16 nt, Homo sapiens
ugccauuuaugacaaa

SEQ ID NO: 6044 - RNA, 16 nt, Homo sapiens
aacaaagaacgagcac

SEQ ID NO: 6045 - RNA, 16 nt, Homo sapiens
cagaguuucugagaua

SEQ ID NO: 6046 - RNA, 16 nt, Homo sapiens
cugagauaauguacgu

SEQ ID NO: 6047 - RNA, 16 nt, Homo sapiens
gaauggggcugaaacc

SEQ ID NO: 6048 - RNA, 16 nt, Homo sapiens
cugaaaccaugugcaa

SEQ ID NO: 6049 - RNA, 16 nt, Homo sapiens
gaaaccaugugcaagu

SEQ ID NO: 6050 - RNA, 16 nt, Homo sapiens
gugcaagucugugucu

SEQ ID NO: 6051 - RNA, 16 nt, Homo sapiens
gcaagucugugucuug

SEQ ID NO: 6052 - RNA, 16 nt, Homo sapiens
ucugugucuugucagu

SEQ ID NO: 6053 - RNA, 16 nt, Homo sapiens
uccaagaagugacacc

SEQ ID NO: 6054 - RNA, 16 nt, Homo sapiens
aagugacaccgagaug

SEQ ID NO: 6055 - RNA, 16 nt, Homo sapiens
acaccgagauguuaau

SEQ ID NO: 6056 - RNA, 16 nt, Homo sapiens
agggacccgugccuug

SEQ ID NO: 6057 - RNA, 16 nt, Homo sapiens
cccgugccuuguuucc

SEQ ID NO: 6058 - RNA, 16 nt, Homo sapiens
ccacaagaaugcaaac

SEQ ID NO: 6059 - RNA, 16 nt, Homo sapiens
acagauacucgcuagc

SEQ ID NO: 6060 - RNA, 16 nt, Homo sapiens
cauuuaaauugauuaa

SEQ ID NO: 6061 - RNA, 16 nt, Homo sapiens
aaggaggagugcaucu

SEQ ID NO: 6062 - RNA, 16 nt, Homo sapiens
aucuuuggccgacagu

SEQ ID NO: 6063 - RNA, 16 nt, Homo sapiens
cgacagugguguaacu

SEQ ID NO: 6064 - RNA, 16 nt, Homo sapiens
ugguguaacugugugu

SEQ ID NO: 6065 - RNA, 16 nt, Homo sapiens
guguaacugugugugu

SEQ ID NO: 6066 - RNA, 16 nt, Homo sapiens
guaacugugugugugu

SEQ ID NO: 6067 - RNA, 16 nt, Homo sapiens
aacugugugugugugu

SEQ ID NO: 6068 - RNA, 16 nt, Homo sapiens
cugugugugugugugu

SEQ ID NO: 6069 - RNA, 16 nt, Homo sapiens
gugugugugugugugu

SEQ ID NO: 6070 - RNA, 16 nt, Homo sapiens
gugugugugugugugg

SEQ ID NO: 6071 - RNA, 16 nt, Homo sapiens
gugugugugugugggu

SEQ ID NO: 6072 - RNA, 16 nt, Homo sapiens
gugugugggugugggu

SEQ ID NO: 6073 - RNA, 16 nt, Homo sapiens
ggguguggguguaugu

SEQ ID NO: 6074 - RNA, 16 nt, Homo sapiens
guggguguaugugugu

SEQ ID NO: 6075 - RNA, 16 nt, Homo sapiens
ggguguauguguguuu

SEQ ID NO: 6076 - RNA, 16 nt, Homo sapiens
guguauguguguuuug

SEQ ID NO: 6077 - RNA, 16 nt, Homo sapiens
uguguguuuugugcau

SEQ ID NO: 6078 - RNA, 16 nt, Homo sapiens
uguguuuugugcauaa

SEQ ID NO: 6079 - RNA, 16 nt, Homo sapiens
aagaauauaugcuaca

SEQ ID NO: 6080 - RNA, 16 nt, Homo sapiens
uucuagucaugaugaa

SEQ ID NO: 6081 - RNA, 16 nt, Homo sapiens
uagucaugaugaaugu

SEQ ID NO: 6082 - RNA, 16 nt, Homo sapiens
caugaugaauguauuu

SEQ ID NO: 6083 - RNA, 16 nt, Homo sapiens
aauguauuuuguauac

SEQ ID NO: 6084 - RNA, 16 nt, Homo sapiens
auugggauuuguaauc

SEQ ID NO: 6085 - RNA, 16 nt, Homo sapiens
caacuuaauugauaaa

SEQ ID NO: 6086 - RNA, 16 nt, Homo sapiens
cuuggcaacugcuuuu

SEQ ID NO: 6087 - RNA, 16 nt, Homo sapiens
cugcuuuuauguucug

SEQ ID NO: 6088 - RNA, 16 nt, Homo sapiens
uuuauguucugucucc

SEQ ID NO: 6089 - RNA, 16 nt, Homo sapiens
auuuauccuuguuuag

SEQ ID NO: 6090 - RNA, 16 nt, Homo sapiens
gaaaaacuuugaaaug

SEQ ID NO: 6091 - RNA, 16 nt, Homo sapiens
ucaaaaaauugcuaaa

SEQ ID NO: 6092 - RNA, 16 nt, Homo sapiens
aaaacuaaauguuagu

SEQ ID NO: 6093 - RNA, 16 nt, Homo sapiens
uaguuuagcugauugu

SEQ ID NO: 6094 - RNA, 16 nt, Homo sapiens
uuagcugauuguaugg

SEQ ID NO: 6095 - RNA, 16 nt, Homo sapiens
ugggguuuucgaaccu

SEQ ID NO: 6096 - RNA, 16 nt, Homo sapiens
uucacuuuuuguuugu

SEQ ID NO: 6097 - RNA, 16 nt, Homo sapiens
cuuuuuguuuguuuua

SEQ ID NO: 6098 - RNA, 16 nt, Homo sapiens
uuucacaacuguguaa

SEQ ID NO: 6099 - RNA, 16 nt, Homo sapiens
ucacaacuguguaaau

SEQ ID NO: 6100 - RNA, 16 nt, Homo sapiens
uguguaaauugccaau

SEQ ID NO: 6101 - RNA, 16 nt, Homo sapiens
aauaauuccuguccau

SEQ ID NO: 6102 - RNA, 16 nt, Homo sapiens
uccuguccaugaaaau

SEQ ID NO: 6103 - RNA, 16 nt, Homo sapiens
ccaugaaaaugcaaau

SEQ ID NO: 6104 - RNA, 16 nt, Homo sapiens
auuauccaguguagau

SEQ ID NO: 6105 - RNA, 16 nt, Homo sapiens
agauauauuugaccau

SEQ ID NO: 6106 - RNA, 16 nt, Homo sapiens
ggcuaguuuugccuuu

SEQ ID NO: 6107 - RNA, 16 nt, Homo sapiens
auuucagccugaaugu

SEQ ID NO: 6108 - RNA, 16 nt, Homo sapiens
cagccugaaugucugc

SEQ ID NO: 6109 - RNA, 16 nt, Homo sapiens
cugaaugucugccuau

SEQ ID NO: 6110 - RNA, 16 nt, Homo sapiens
uauauucucugcucuu

SEQ ID NO: 6111 - RNA, 16 nt, Homo sapiens
ucugcucuuuguauuc

SEQ ID NO: 6112 - RNA, 16 nt, Homo sapiens
auucuccuuugaaccc

SEQ ID NO: 6113 - RNA, 16 nt, Homo sapiens
aaaacauccuguggca

SEQ ID NO: 6114 - RNA, 17 nt, Homo sapiens
caaggugcugcuggccg

SEQ ID NO: 6115 - RNA, 17 nt, Homo sapiens
ggugcugcuggccgucg

SEQ ID NO: 6116 - RNA, 17 nt, Homo sapiens
cugcuggccgucgcccu

SEQ ID NO: 6117 - RNA, 17 nt, Homo sapiens
gccgucgcccuguggcu

SEQ ID NO: 6118 - RNA, 17 nt, Homo sapiens
ccgucgcccuguggcuc

SEQ ID NO: 6119 - RNA, 17 nt, Homo sapiens
cgucgcccuguggcucu

SEQ ID NO: 6120 - RNA, 17 nt, Homo sapiens
ccuguggcucugcgugg

SEQ ID NO: 6121 - RNA, 17 nt, Homo sapiens
uguggcucugcguggag

SEQ ID NO: 6122 - RNA, 17 nt, Homo sapiens
guggagacccgggccgc

SEQ ID NO: 6123 - RNA, 17 nt, Homo sapiens
uggagacccgggccgcc

SEQ ID NO: 6124 - RNA, 17 nt, Homo sapiens
acccgggccgccucugu

SEQ ID NO: 6125 - RNA, 17 nt, Homo sapiens
cgggccgccucuguggg

SEQ ID NO: 6126 - RNA, 17 nt, Homo sapiens
gggccgccucugugggu

SEQ ID NO: 6127 - RNA, 17 nt, Homo sapiens
gccgccucuguggguuu

SEQ ID NO: 6128 - RNA, 17 nt, Homo sapiens
ggguuugccuaguguuu

SEQ ID NO: 6129 - RNA, 17 nt, Homo sapiens
gguuugccuaguguuuc

SEQ ID NO: 6130 - RNA, 17 nt, Homo sapiens
aguguuucucuugaucu

SEQ ID NO: 6131 - RNA, 17 nt, Homo sapiens
uguuucucuugaucugc

SEQ ID NO: 6132 - RNA, 17 nt, Homo sapiens
ucuugaucugcccaggc

SEQ ID NO: 6133 - RNA, 17 nt, Homo sapiens
ugaucugcccaggcuca

SEQ ID NO: 6134 - RNA, 17 nt, Homo sapiens
gaucugcccaggcucag

SEQ ID NO: 6135 - RNA, 17 nt, Homo sapiens
aucugcccaggcucagc

SEQ ID NO: 6136 - RNA, 17 nt, Homo sapiens
gcccaggcucagcauac

SEQ ID NO: 6137 - RNA, 17 nt, Homo sapiens
ccaggcucagcauacaa

SEQ ID NO: 6138 - RNA, 17 nt, Homo sapiens
ggcucagcauacaaaaa

SEQ ID NO: 6139 - RNA, 17 nt, Homo sapiens
cagcauacaaaaagaca

SEQ ID NO: 6140 - RNA, 17 nt, Homo sapiens
aaaaagacauacuuaca

SEQ ID NO: 6141 - RNA, 17 nt, Homo sapiens
agacauacuuacaauua

SEQ ID NO: 6142 - RNA, 17 nt, Homo sapiens
auacuuacaauuaaggc

SEQ ID NO: 6143 - RNA, 17 nt, Homo sapiens
auuaaggcuaauacaac

SEQ ID NO: 6144 - RNA, 17 nt, Homo sapiens
gcuaauacaacucuuca

SEQ ID NO: 6145 - RNA, 17 nt, Homo sapiens
aauacaacucuucaaau

SEQ ID NO: 6146 - RNA, 17 nt, Homo sapiens
uacaacucuucaaauua

SEQ ID NO: 6147 - RNA, 17 nt, Homo sapiens
aacucuucaaauuacuu

SEQ ID NO: 6148 - RNA, 17 nt, Homo sapiens
caaauuacuugcagggg

SEQ ID NO: 6149 - RNA, 17 nt, Homo sapiens
uuacuugcaggggacag

SEQ ID NO: 6150 - RNA, 17 nt, Homo sapiens
caggggacagagggacu

SEQ ID NO: 6151 - RNA, 17 nt, Homo sapiens
agagggacuuggacugg

SEQ ID NO: 6152 - RNA, 17 nt, Homo sapiens
acuuggacuggcuuugg

SEQ ID NO: 6153 - RNA, 17 nt, Homo sapiens
ggacuggcuuuggccca

SEQ ID NO: 6154 - RNA, 17 nt, Homo sapiens
gcuuuggcccaauaauc

SEQ ID NO: 6155 - RNA, 17 nt, Homo sapiens
cuuuggcccaauaauca

SEQ ID NO: 6156 - RNA, 17 nt, Homo sapiens
uuuggcccaauaaucag

SEQ ID NO: 6157 - RNA, 17 nt, Homo sapiens
caauaaucagaguggca

SEQ ID NO: 6158 - RNA, 17 nt, Homo sapiens
agaguggcagugagcaa

SEQ ID NO: 6159 - RNA, 17 nt, Homo sapiens
cagugagcaaagggugg

SEQ ID NO: 6160 - RNA, 17 nt, Homo sapiens
gaggugacugagugcag

SEQ ID NO: 6161 - RNA, 17 nt, Homo sapiens
cugagugcagcgauggc

SEQ ID NO: 6162 - RNA, 17 nt, Homo sapiens
gcgauggccucuucugu

SEQ ID NO: 6163 - RNA, 17 nt, Homo sapiens
cgauggccucuucugua

SEQ ID NO: 6164 - RNA, 17 nt, Homo sapiens
auggccucuucuguaag

SEQ ID NO: 6165 - RNA, 17 nt, Homo sapiens
gccucuucuguaagaca

SEQ ID NO: 6166 - RNA, 17 nt, Homo sapiens
uguaagacacucacaau

SEQ ID NO: 6167 - RNA, 17 nt, Homo sapiens
uaagacacucacaauuc

SEQ ID NO: 6168 - RNA, 17 nt, Homo sapiens
agacacucacaauucca

SEQ ID NO: 6169 - RNA, 17 nt, Homo sapiens
acacucacaauuccaaa

SEQ ID NO: 6170 - RNA, 17 nt, Homo sapiens
cacaauuccaaaaguga

SEQ ID NO: 6171 - RNA, 17 nt, Homo sapiens
acaauuccaaaagugau

SEQ ID NO: 6172 - RNA, 17 nt, Homo sapiens
gaaaugacacuggagcc

SEQ ID NO: 6173 - RNA, 17 nt, Homo sapiens
aaugacacuggagccua

SEQ ID NO: 6174 - RNA, 17 nt, Homo sapiens
acuggagccuacaagug

SEQ ID NO: 6175 - RNA, 17 nt, Homo sapiens
cuggagccuacaagugc

SEQ ID NO: 6176 - RNA, 17 nt, Homo sapiens
gagccuacaagugcuuc

SEQ ID NO: 6177 - RNA, 17 nt, Homo sapiens
acaagugcuucuaccgg

SEQ ID NO: 6178 - RNA, 17 nt, Homo sapiens
agugcuucuaccgggaa

SEQ ID NO: 6179 - RNA, 17 nt, Homo sapiens
gcuucuaccgggaaacu

SEQ ID NO: 6180 - RNA, 17 nt, Homo sapiens
cgggaaacugacuuggc

SEQ ID NO: 6181 - RNA, 17 nt, Homo sapiens
aaacugacuuggccucg

SEQ ID NO: 6182 - RNA, 17 nt, Homo sapiens
gacuuggccucggucau

SEQ ID NO: 6183 - RNA, 17 nt, Homo sapiens
acuuggccucggucauu

SEQ ID NO: 6184 - RNA, 17 nt, Homo sapiens
ccucggucauuuauguc

SEQ ID NO: 6185 - RNA, 17 nt, Homo sapiens
uuuaugucuauguucaa

SEQ ID NO: 6186 - RNA, 17 nt, Homo sapiens
cuauguucaagauuaca

SEQ ID NO: 6187 - RNA, 17 nt, Homo sapiens
aagauuacagaucucca

SEQ ID NO: 6188 - RNA, 17 nt, Homo sapiens
uacagaucuccauuuau

SEQ ID NO: 6189 - RNA, 17 nt, Homo sapiens
cagaucuccauuuauug

SEQ ID NO: 6190 - RNA, 17 nt, Homo sapiens
agaucuccauuuauugc

SEQ ID NO: 6191 - RNA, 17 nt, Homo sapiens
uuuauugcuucuguuag

SEQ ID NO: 6192 - RNA, 17 nt, Homo sapiens
auugcuucuguuaguga

SEQ ID NO: 6193 - RNA, 17 nt, Homo sapiens
uuagugaccaacaugga

SEQ ID NO: 6194 - RNA, 17 nt, Homo sapiens
uagugaccaacauggag

SEQ ID NO: 6195 - RNA, 17 nt, Homo sapiens
ugaccaacauggagucg

SEQ ID NO: 6196 - RNA, 17 nt, Homo sapiens
ucguguacauuacugag

SEQ ID NO: 6197 - RNA, 17 nt, Homo sapiens
uacauuacugagaacaa

SEQ ID NO: 6198 - RNA, 17 nt, Homo sapiens
cugagaacaaaaacaaa

SEQ ID NO: 6199 - RNA, 17 nt, Homo sapiens
acaaaaacaaaacugug

SEQ ID NO: 6200 - RNA, 17 nt, Homo sapiens
aacaaaacuguggugau

SEQ ID NO: 6201 - RNA, 17 nt, Homo sapiens
ggugauuccaugucucg

SEQ ID NO: 6202 - RNA, 17 nt, Homo sapiens
gugauuccaugucucgg

SEQ ID NO: 6203 - RNA, 17 nt, Homo sapiens
uccaugucucgggucca

SEQ ID NO: 6204 - RNA, 17 nt, Homo sapiens
cucggguccauuucaaa

SEQ ID NO: 6205 - RNA, 17 nt, Homo sapiens
ucggguccauuucaaau

SEQ ID NO: 6206 - RNA, 17 nt, Homo sapiens
uccauuucaaaucucaa

SEQ ID NO: 6207 - RNA, 17 nt, Homo sapiens
uucaaaucucaacgugu

SEQ ID NO: 6208 - RNA, 17 nt, Homo sapiens
caaaucucaacguguca

SEQ ID NO: 6209 - RNA, 17 nt, Homo sapiens
aacgugucacuuugugc

SEQ ID NO: 6210 - RNA, 17 nt, Homo sapiens
cgugucacuuugugcaa

SEQ ID NO: 6211 - RNA, 17 nt, Homo sapiens
cuuugugcaagauaccc

SEQ ID NO: 6212 - RNA, 17 nt, Homo sapiens
caagauacccagaaaag

SEQ ID NO: 6213 - RNA, 17 nt, Homo sapiens
aagauacccagaaaaga

SEQ ID NO: 6214 - RNA, 17 nt, Homo sapiens
agauacccagaaaagag

SEQ ID NO: 6215 - RNA, 17 nt, Homo sapiens
auuuguuccugauggua

SEQ ID NO: 6216 - RNA, 17 nt, Homo sapiens
uuuguuccugaugguaa

SEQ ID NO: 6217 - RNA, 17 nt, Homo sapiens
augguaacagaauuucc

SEQ ID NO: 6218 - RNA, 17 nt, Homo sapiens
agaauuuccugggacag

SEQ ID NO: 6219 - RNA, 17 nt, Homo sapiens
gaauuuccugggacagc

SEQ ID NO: 6220 - RNA, 17 nt, Homo sapiens
ccugggacagcaagaag

SEQ ID NO: 6221 - RNA, 17 nt, Homo sapiens
gggacagcaagaagggc

SEQ ID NO: 6222 - RNA, 17 nt, Homo sapiens
agaagggcuuuacuauu

SEQ ID NO: 6223 - RNA, 17 nt, Homo sapiens
ggcuuuacuauucccag

SEQ ID NO: 6224 - RNA, 17 nt, Homo sapiens
uacuauucccagcuaca

SEQ ID NO: 6225 - RNA, 17 nt, Homo sapiens
acuauucccagcuacau

SEQ ID NO: 6226 - RNA, 17 nt, Homo sapiens
cuauucccagcuacaug

SEQ ID NO: 6227 - RNA, 17 nt, Homo sapiens
uucccagcuacaugauc

SEQ ID NO: 6228 - RNA, 17 nt, Homo sapiens
ccagcuacaugaucagc

SEQ ID NO: 6229 - RNA, 17 nt, Homo sapiens
acaugaucagcuaugcu

SEQ ID NO: 6230 - RNA, 17 nt, Homo sapiens
ugaucagcuaugcuggc

SEQ ID NO: 6231 - RNA, 17 nt, Homo sapiens
agcuaugcuggcauggu

SEQ ID NO: 6232 - RNA, 17 nt, Homo sapiens
augcuggcauggucuuc

SEQ ID NO: 6233 - RNA, 17 nt, Homo sapiens
gcauggucuucugugaa

SEQ ID NO: 6234 - RNA, 17 nt, Homo sapiens
uggucuucugugaagca

SEQ ID NO: 6235 - RNA, 17 nt, Homo sapiens
ugugaagcaaaaauuaa

SEQ ID NO: 6236 - RNA, 17 nt, Homo sapiens
aaaguuaccagucuauu

SEQ ID NO: 6237 - RNA, 17 nt, Homo sapiens
aaguuaccagucuauua

SEQ ID NO: 6238 - RNA, 17 nt, Homo sapiens
uaccagucuauuaugua

SEQ ID NO: 6239 - RNA, 17 nt, Homo sapiens
uuauguacauaguuguc

SEQ ID NO: 6240 - RNA, 17 nt, Homo sapiens
ugugguucugaguccgu

SEQ ID NO: 6241 - RNA, 17 nt, Homo sapiens
ucugaguccgucucaug

SEQ ID NO: 6242 - RNA, 17 nt, Homo sapiens
aguccgucucauggaau

SEQ ID NO: 6243 - RNA, 17 nt, Homo sapiens
uccgucucauggaauug

SEQ ID NO: 6244 - RNA, 17 nt, Homo sapiens
aauugaacuaucuguug

SEQ ID NO: 6245 - RNA, 17 nt, Homo sapiens
gaacuaucuguuggaga

SEQ ID NO: 6246 - RNA, 17 nt, Homo sapiens
agaaaagcuugucuuaa

SEQ ID NO: 6247 - RNA, 17 nt, Homo sapiens
agcuugucuuaaauugu

SEQ ID NO: 6248 - RNA, 17 nt, Homo sapiens
aauuguacagcaagaac

SEQ ID NO: 6249 - RNA, 17 nt, Homo sapiens
uguacagcaagaacuga

SEQ ID NO: 6250 - RNA, 17 nt, Homo sapiens
gcaagaacugaacuaaa

SEQ ID NO: 6251 - RNA, 17 nt, Homo sapiens
aacugaacuaaaugugg

SEQ ID NO: 6252 - RNA, 17 nt, Homo sapiens
ggauugacuucaacugg

SEQ ID NO: 6253 - RNA, 17 nt, Homo sapiens
uugacuucaacugggaa

SEQ ID NO: 6254 - RNA, 17 nt, Homo sapiens
acuucaacugggaauac

SEQ ID NO: 6255 - RNA, 17 nt, Homo sapiens
gggaauacccuucuucg

SEQ ID NO: 6256 - RNA, 17 nt, Homo sapiens
ggaauacccuucuucga

SEQ ID NO: 6257 - RNA, 17 nt, Homo sapiens
gaauacccuucuucgaa

SEQ ID NO: 6258 - RNA, 17 nt, Homo sapiens
uacccuucuucgaagca

SEQ ID NO: 6259 - RNA, 17 nt, Homo sapiens
uucgaagcaucagcaua

SEQ ID NO: 6260 - RNA, 17 nt, Homo sapiens
gaagcaucagcauaaga

SEQ ID NO: 6261 - RNA, 17 nt, Homo sapiens
gcaucagcauaagaaac

SEQ ID NO: 6262 - RNA, 17 nt, Homo sapiens
uaagaaacuuguaaacc

SEQ ID NO: 6263 - RNA, 17 nt, Homo sapiens
uuguaaaccgagaccua

SEQ ID NO: 6264 - RNA, 17 nt, Homo sapiens
accgagaccuaaaaacc

SEQ ID NO: 6265 - RNA, 17 nt, Homo sapiens
ccgagaccuaaaaaccc

SEQ ID NO: 6266 - RNA, 17 nt, Homo sapiens
cuaaaaacccagucugg

SEQ ID NO: 6267 - RNA, 17 nt, Homo sapiens
uaaaaacccagucuggg

SEQ ID NO: 6268 - RNA, 17 nt, Homo sapiens
aaaaacccagucuggga

SEQ ID NO: 6269 - RNA, 17 nt, Homo sapiens
acccagucugggaguga

SEQ ID NO: 6270 - RNA, 17 nt, Homo sapiens
uuuugagcaccuuaacu

SEQ ID NO: 6271 - RNA, 17 nt, Homo sapiens
uugagcaccuuaacuau

SEQ ID NO: 6272 - RNA, 17 nt, Homo sapiens
ugagcaccuuaacuaua

SEQ ID NO: 6273 - RNA, 17 nt, Homo sapiens
accuuaacuauagaugg

SEQ ID NO: 6274 - RNA, 17 nt, Homo sapiens
gguguaacccggaguga

SEQ ID NO: 6275 - RNA, 17 nt, Homo sapiens
guguaacccggagugac

SEQ ID NO: 6276 - RNA, 17 nt, Homo sapiens
ggagugaccaaggauug

SEQ ID NO: 6277 - RNA, 17 nt, Homo sapiens
gagugaccaaggauugu

SEQ ID NO: 6278 - RNA, 17 nt, Homo sapiens
gauuguacaccugugca

SEQ ID NO: 6279 - RNA, 17 nt, Homo sapiens
uuguacaccugugcagc

SEQ ID NO: 6280 - RNA, 17 nt, Homo sapiens
uguacaccugugcagca

SEQ ID NO: 6281 - RNA, 17 nt, Homo sapiens
accugugcagcauccag

SEQ ID NO: 6282 - RNA, 17 nt, Homo sapiens
ugugcagcauccagugg

SEQ ID NO: 6283 - RNA, 17 nt, Homo sapiens
gcagcauccagugggcu

SEQ ID NO: 6284 - RNA, 17 nt, Homo sapiens
cagcauccagugggcug

SEQ ID NO: 6285 - RNA, 17 nt, Homo sapiens
cagugggcugaugacca

SEQ ID NO: 6286 - RNA, 17 nt, Homo sapiens
cugaugaccaagaagaa

SEQ ID NO: 6287 - RNA, 17 nt, Homo sapiens
ugaugaccaagaagaac

SEQ ID NO: 6288 - RNA, 17 nt, Homo sapiens
agaagaacagcacauuu

SEQ ID NO: 6289 - RNA, 17 nt, Homo sapiens
agaacagcacauuuguc

SEQ ID NO: 6290 - RNA, 17 nt, Homo sapiens
aacagcacauuugucag

SEQ ID NO: 6291 - RNA, 17 nt, Homo sapiens
cauuugucaggguccau

SEQ ID NO: 6292 - RNA, 17 nt, Homo sapiens
ucaggguccaugaaaaa

SEQ ID NO: 6293 - RNA, 17 nt, Homo sapiens
caggguccaugaaaaac

SEQ ID NO: 6294 - RNA, 17 nt, Homo sapiens
ugaaaaaccuuuuguug

SEQ ID NO: 6295 - RNA, 17 nt, Homo sapiens
gaaaaaccuuuuguugc

SEQ ID NO: 6296 - RNA, 17 nt, Homo sapiens
uuuguugcuuuuggaag

SEQ ID NO: 6297 - RNA, 17 nt, Homo sapiens
gaaguggcauggaaucu

SEQ ID NO: 6298 - RNA, 17 nt, Homo sapiens
auggaaucucuggugga

SEQ ID NO: 6299 - RNA, 17 nt, Homo sapiens
ggaaucucugguggaag

SEQ ID NO: 6300 - RNA, 17 nt, Homo sapiens
guggaagccacgguggg

SEQ ID NO: 6301 - RNA, 17 nt, Homo sapiens
uggaagccacggugggg

SEQ ID NO: 6302 - RNA, 17 nt, Homo sapiens
agcgugucagaaucccu

SEQ ID NO: 6303 - RNA, 17 nt, Homo sapiens
ucagaaucccugcgaag

SEQ ID NO: 6304 - RNA, 17 nt, Homo sapiens
cagaaucccugcgaagu

SEQ ID NO: 6305 - RNA, 17 nt, Homo sapiens
agaaucccugcgaagua

SEQ ID NO: 6306 - RNA, 17 nt, Homo sapiens
cgaaguaccuugguuac

SEQ ID NO: 6307 - RNA, 17 nt, Homo sapiens
gaaguaccuugguuacc

SEQ ID NO: 6308 - RNA, 17 nt, Homo sapiens
uugguuacccaccccca

SEQ ID NO: 6309 - RNA, 17 nt, Homo sapiens
ugguuacccacccccag

SEQ ID NO: 6310 - RNA, 17 nt, Homo sapiens
gguuacccacccccaga

SEQ ID NO: 6311 - RNA, 17 nt, Homo sapiens
uuacccacccccagaaa

SEQ ID NO: 6312 - RNA, 17 nt, Homo sapiens
uacccacccccagaaau

SEQ ID NO: 6313 - RNA, 17 nt, Homo sapiens
acccacccccagaaaua

SEQ ID NO: 6314 - RNA, 17 nt, Homo sapiens
cccacccccagaaauaa

SEQ ID NO: 6315 - RNA, 17 nt, Homo sapiens
ccacccccagaaauaaa

SEQ ID NO: 6316 - RNA, 17 nt, Homo sapiens
uggaauaccccuugagu

SEQ ID NO: 6317 - RNA, 17 nt, Homo sapiens
ggaauaccccuugaguc

SEQ ID NO: 6318 - RNA, 17 nt, Homo sapiens
gaauaccccuugagucc

SEQ ID NO: 6319 - RNA, 17 nt, Homo sapiens
aauaccccuugagucca

SEQ ID NO: 6320 - RNA, 17 nt, Homo sapiens
cuugaguccaaucacac

SEQ ID NO: 6321 - RNA, 17 nt, Homo sapiens
uugaguccaaucacaca

SEQ ID NO: 6322 - RNA, 17 nt, Homo sapiens
guccaaucacacaauua

SEQ ID NO: 6323 - RNA, 17 nt, Homo sapiens
ccaaucacacaauuaaa

SEQ ID NO: 6324 - RNA, 17 nt, Homo sapiens
aaucacacaauuaaagc

SEQ ID NO: 6325 - RNA, 17 nt, Homo sapiens
agcggggcauguacuga

SEQ ID NO: 6326 - RNA, 17 nt, Homo sapiens
gcauguacugacgauua

SEQ ID NO: 6327 - RNA, 17 nt, Homo sapiens
aaagagacacaggaaau

SEQ ID NO: 6328 - RNA, 17 nt, Homo sapiens
agagacacaggaaauua

SEQ ID NO: 6329 - RNA, 17 nt, Homo sapiens
gaaauuacacugucauc

SEQ ID NO: 6330 - RNA, 17 nt, Homo sapiens
aauuacacugucauccu

SEQ ID NO: 6331 - RNA, 17 nt, Homo sapiens
acacugucauccuuacc

SEQ ID NO: 6332 - RNA, 17 nt, Homo sapiens
cugucauccuuaccaau

SEQ ID NO: 6333 - RNA, 17 nt, Homo sapiens
ugucauccuuaccaauc

SEQ ID NO: 6334 - RNA, 17 nt, Homo sapiens
auccuuaccaaucccau

SEQ ID NO: 6335 - RNA, 17 nt, Homo sapiens
uccuuaccaaucccauu

SEQ ID NO: 6336 - RNA, 17 nt, Homo sapiens
uaccaaucccauuucaa

SEQ ID NO: 6337 - RNA, 17 nt, Homo sapiens
accaaucccauuucaaa

SEQ ID NO: 6338 - RNA, 17 nt, Homo sapiens
ccaaucccauuucaaag

SEQ ID NO: 6339 - RNA, 17 nt, Homo sapiens
cccauuucaaaggagaa

SEQ ID NO: 6340 - RNA, 17 nt, Homo sapiens
ggagaagcagagccaug

SEQ ID NO: 6341 - RNA, 17 nt, Homo sapiens
agcagagccaugugguc

SEQ ID NO: 6342 - RNA, 17 nt, Homo sapiens
gcagagccauguggucu

SEQ ID NO: 6343 - RNA, 17 nt, Homo sapiens
auguggucucucugguu

SEQ ID NO: 6344 - RNA, 17 nt, Homo sapiens
guggucucucugguugu

SEQ ID NO: 6345 - RNA, 17 nt, Homo sapiens
ggucucucugguugugu

SEQ ID NO: 6346 - RNA, 17 nt, Homo sapiens
uguaugucccaccccag

SEQ ID NO: 6347 - RNA, 17 nt, Homo sapiens
guaugucccaccccaga

SEQ ID NO: 6348 - RNA, 17 nt, Homo sapiens
uaugucccaccccagau

SEQ ID NO: 6349 - RNA, 17 nt, Homo sapiens
ugucccaccccagauug

SEQ ID NO: 6350 - RNA, 17 nt, Homo sapiens
gucccaccccagauugg

SEQ ID NO: 6351 - RNA, 17 nt, Homo sapiens
ucccaccccagauuggu

SEQ ID NO: 6352 - RNA, 17 nt, Homo sapiens
cccaccccagauuggug

SEQ ID NO: 6353 - RNA, 17 nt, Homo sapiens
gagaaaucucuaaucuc

SEQ ID NO: 6354 - RNA, 17 nt, Homo sapiens
gaaaucucuaaucucuc

SEQ ID NO: 6355 - RNA, 17 nt, Homo sapiens
cucuaaucucuccugug

SEQ ID NO: 6356 - RNA, 17 nt, Homo sapiens
cuaaucucuccugugga

SEQ ID NO: 6357 - RNA, 17 nt, Homo sapiens
aaucucuccuguggauu

SEQ ID NO: 6358 - RNA, 17 nt, Homo sapiens
aucucuccuguggauuc

SEQ ID NO: 6359 - RNA, 17 nt, Homo sapiens
guggauuccuaccagua

SEQ ID NO: 6360 - RNA, 17 nt, Homo sapiens
uggauuccuaccaguac

SEQ ID NO: 6361 - RNA, 17 nt, Homo sapiens
auuccuaccaguacggc

SEQ ID NO: 6362 - RNA, 17 nt, Homo sapiens
uuccuaccaguacggca

SEQ ID NO: 6363 - RNA, 17 nt, Homo sapiens
aguacggcaccacucaa

SEQ ID NO: 6364 - RNA, 17 nt, Homo sapiens
uacggcaccacucaaac

SEQ ID NO: 6365 - RNA, 17 nt, Homo sapiens
acggcaccacucaaacg

SEQ ID NO: 6366 - RNA, 17 nt, Homo sapiens
ggcaccacucaaacgcu

SEQ ID NO: 6367 - RNA, 17 nt, Homo sapiens
caccacucaaacgcuga

SEQ ID NO: 6368 - RNA, 17 nt, Homo sapiens
ucaaacgcugacaugua

SEQ ID NO: 6369 - RNA, 17 nt, Homo sapiens
acgcugacauguacggu

SEQ ID NO: 6370 - RNA, 17 nt, Homo sapiens
guacggucuaugccauu

SEQ ID NO: 6371 - RNA, 17 nt, Homo sapiens
gucuaugccauuccucc

SEQ ID NO: 6372 - RNA, 17 nt, Homo sapiens
ucuaugccauuccuccc

SEQ ID NO: 6373 - RNA, 17 nt, Homo sapiens
ugccauuccucccccgc

SEQ ID NO: 6374 - RNA, 17 nt, Homo sapiens
gccauuccucccccgca

SEQ ID NO: 6375 - RNA, 17 nt, Homo sapiens
cauuccucccccgcauc

SEQ ID NO: 6376 - RNA, 17 nt, Homo sapiens
auuccucccccgcauca

SEQ ID NO: 6377 - RNA, 17 nt, Homo sapiens
uuccucccccgcaucac

SEQ ID NO: 6378 - RNA, 17 nt, Homo sapiens
uccucccccgcaucaca

SEQ ID NO: 6379 - RNA, 17 nt, Homo sapiens
ucccccgcaucacaucc

SEQ ID NO: 6380 - RNA, 17 nt, Homo sapiens
cccgcaucacauccacu

SEQ ID NO: 6381 - RNA, 17 nt, Homo sapiens
cgcaucacauccacugg

SEQ ID NO: 6382 - RNA, 17 nt, Homo sapiens
aucacauccacugguau

SEQ ID NO: 6383 - RNA, 17 nt, Homo sapiens
ucacauccacugguauu

SEQ ID NO: 6384 - RNA, 17 nt, Homo sapiens
acauccacugguauugg

SEQ ID NO: 6385 - RNA, 17 nt, Homo sapiens
guauuggcaguuggagg

SEQ ID NO: 6386 - RNA, 17 nt, Homo sapiens
gagugcgccaacgagcc

SEQ ID NO: 6387 - RNA, 17 nt, Homo sapiens
agugcgccaacgagccc

SEQ ID NO: 6388 - RNA, 17 nt, Homo sapiens
caacgagcccagccaag

SEQ ID NO: 6389 - RNA, 17 nt, Homo sapiens
aacgagcccagccaagc

SEQ ID NO: 6390 - RNA, 17 nt, Homo sapiens
acgagcccagccaagcu

SEQ ID NO: 6391 - RNA, 17 nt, Homo sapiens
agcccagccaagcuguc

SEQ ID NO: 6392 - RNA, 17 nt, Homo sapiens
gcccagccaagcugucu

SEQ ID NO: 6393 - RNA, 17 nt, Homo sapiens
agccaagcugucucagu

SEQ ID NO: 6394 - RNA, 17 nt, Homo sapiens
aagcugucucagugaca

SEQ ID NO: 6395 - RNA, 17 nt, Homo sapiens
gcugucucagugacaaa

SEQ ID NO: 6396 - RNA, 17 nt, Homo sapiens
ucagugacaaacccaua

SEQ ID NO: 6397 - RNA, 17 nt, Homo sapiens
ugacaaacccauacccu

SEQ ID NO: 6398 - RNA, 17 nt, Homo sapiens
gacaaacccauacccuu

SEQ ID NO: 6399 - RNA, 17 nt, Homo sapiens
acaaacccauacccuug

SEQ ID NO: 6400 - RNA, 17 nt, Homo sapiens
acccauacccuugugaa

SEQ ID NO: 6401 - RNA, 17 nt, Homo sapiens
cccauacccuugugaag

SEQ ID NO: 6402 - RNA, 17 nt, Homo sapiens
ccauacccuugugaaga

SEQ ID NO: 6403 - RNA, 17 nt, Homo sapiens
uggaggacuuccaggga

SEQ ID NO: 6404 - RNA, 17 nt, Homo sapiens
aggacuuccagggagga

SEQ ID NO: 6405 - RNA, 17 nt, Homo sapiens
ggacuuccagggaggaa

SEQ ID NO: 6406 - RNA, 17 nt, Homo sapiens
uaaaaaucaauuugcuc

SEQ ID NO: 6407 - RNA, 17 nt, Homo sapiens
caauuugcucuaauuga

SEQ ID NO: 6408 - RNA, 17 nt, Homo sapiens
auuugcucuaauugaag

SEQ ID NO: 6409 - RNA, 17 nt, Homo sapiens
gaaaaaacaaaacugua

SEQ ID NO: 6410 - RNA, 17 nt, Homo sapiens
aacaaaacuguaaguac

SEQ ID NO: 6411 - RNA, 17 nt, Homo sapiens
guaaguacccuuguuau

SEQ ID NO: 6412 - RNA, 17 nt, Homo sapiens
uaaguacccuuguuauc

SEQ ID NO: 6413 - RNA, 17 nt, Homo sapiens
aaguacccuuguuaucc

SEQ ID NO: 6414 - RNA, 17 nt, Homo sapiens
uuguuauccaagcggca

SEQ ID NO: 6415 - RNA, 17 nt, Homo sapiens
uguuauccaagcggcaa

SEQ ID NO: 6416 - RNA, 17 nt, Homo sapiens
caagcggcaaauguguc

SEQ ID NO: 6417 - RNA, 17 nt, Homo sapiens
aaugugucagcuuugua

SEQ ID NO: 6418 - RNA, 17 nt, Homo sapiens
gugucagcuuuguacaa

SEQ ID NO: 6419 - RNA, 17 nt, Homo sapiens
cuuuguacaaaugugaa

SEQ ID NO: 6420 - RNA, 17 nt, Homo sapiens
aagcggucaacaaaguc

SEQ ID NO: 6421 - RNA, 17 nt, Homo sapiens
cggucaacaaagucggg

SEQ ID NO: 6422 - RNA, 17 nt, Homo sapiens
gggugaucuccuuccac

SEQ ID NO: 6423 - RNA, 17 nt, Homo sapiens
gugaucuccuuccacgu

SEQ ID NO: 6424 - RNA, 17 nt, Homo sapiens
ugaucuccuuccacgug

SEQ ID NO: 6425 - RNA, 17 nt, Homo sapiens
ucuccuuccacgugacc

SEQ ID NO: 6426 - RNA, 17 nt, Homo sapiens
cuccuuccacgugacca

SEQ ID NO: 6427 - RNA, 17 nt, Homo sapiens
cacgugaccaggggucc

SEQ ID NO: 6428 - RNA, 17 nt, Homo sapiens
acgugaccagggguccu

SEQ ID NO: 6429 - RNA, 17 nt, Homo sapiens
cagggguccugaaauua

SEQ ID NO: 6430 - RNA, 17 nt, Homo sapiens
agggguccugaaauuac

SEQ ID NO: 6431 - RNA, 17 nt, Homo sapiens
gaaauuacuuugcaacc

SEQ ID NO: 6432 - RNA, 17 nt, Homo sapiens
uacuuugcaaccugaca

SEQ ID NO: 6433 - RNA, 17 nt, Homo sapiens
uuugcaaccugacaugc

SEQ ID NO: 6434 - RNA, 17 nt, Homo sapiens
uugcaaccugacaugca

SEQ ID NO: 6435 - RNA, 17 nt, Homo sapiens
aaccugacaugcagccc

SEQ ID NO: 6436 - RNA, 17 nt, Homo sapiens
ugacaugcagcccacug

SEQ ID NO: 6437 - RNA, 17 nt, Homo sapiens
caugcagcccacugagc

SEQ ID NO: 6438 - RNA, 17 nt, Homo sapiens
augcagcccacugagca

SEQ ID NO: 6439 - RNA, 17 nt, Homo sapiens
ugcagcccacugagcag

SEQ ID NO: 6440 - RNA, 17 nt, Homo sapiens
cagcccacugagcagga

SEQ ID NO: 6441 - RNA, 17 nt, Homo sapiens
cacugagcaggagagcg

SEQ ID NO: 6442 - RNA, 17 nt, Homo sapiens
agcgugucuuuguggug

SEQ ID NO: 6443 - RNA, 17 nt, Homo sapiens
uguggugcacugcagac

SEQ ID NO: 6444 - RNA, 17 nt, Homo sapiens
uggugcacugcagacag

SEQ ID NO: 6445 - RNA, 17 nt, Homo sapiens
ugcacugcagacagauc

SEQ ID NO: 6446 - RNA, 17 nt, Homo sapiens
cugcagacagaucuacg

SEQ ID NO: 6447 - RNA, 17 nt, Homo sapiens
gacagaucuacguuuga

SEQ ID NO: 6448 - RNA, 17 nt, Homo sapiens
uugagaaccucacaugg

SEQ ID NO: 6449 - RNA, 17 nt, Homo sapiens
ugagaaccucacauggu

SEQ ID NO: 6450 - RNA, 17 nt, Homo sapiens
agaaccucacaugguac

SEQ ID NO: 6451 - RNA, 17 nt, Homo sapiens
aaccucacaugguacaa

SEQ ID NO: 6452 - RNA, 17 nt, Homo sapiens
caugguacaagcuuggc

SEQ ID NO: 6453 - RNA, 17 nt, Homo sapiens
guacaagcuuggcccac

SEQ ID NO: 6454 - RNA, 17 nt, Homo sapiens
agcuuggcccacagccu

SEQ ID NO: 6455 - RNA, 17 nt, Homo sapiens
gcuuggcccacagccuc

SEQ ID NO: 6456 - RNA, 17 nt, Homo sapiens
cuuggcccacagccucu

SEQ ID NO: 6457 - RNA, 17 nt, Homo sapiens
uggcccacagccucugc

SEQ ID NO: 6458 - RNA, 17 nt, Homo sapiens
cccacagccucugccaa

SEQ ID NO: 6459 - RNA, 17 nt, Homo sapiens
ccacagccucugccaau

SEQ ID NO: 6460 - RNA, 17 nt, Homo sapiens
acagccucugccaaucc

SEQ ID NO: 6461 - RNA, 17 nt, Homo sapiens
gccucugccaauccaug

SEQ ID NO: 6462 - RNA, 17 nt, Homo sapiens
ccucugccaauccaugu

SEQ ID NO: 6463 - RNA, 17 nt, Homo sapiens
ugccaauccauguggga

SEQ ID NO: 6464 - RNA, 17 nt, Homo sapiens
gccaauccaugugggag

SEQ ID NO: 6465 - RNA, 17 nt, Homo sapiens
agaguugcccacaccug

SEQ ID NO: 6466 - RNA, 17 nt, Homo sapiens
gaguugcccacaccugu

SEQ ID NO: 6467 - RNA, 17 nt, Homo sapiens
aguugcccacaccuguu

SEQ ID NO: 6468 - RNA, 17 nt, Homo sapiens
uugcccacaccuguuug

SEQ ID NO: 6469 - RNA, 17 nt, Homo sapiens
gcccacaccuguuugca

SEQ ID NO: 6470 - RNA, 17 nt, Homo sapiens
cccacaccuguuugcaa

SEQ ID NO: 6471 - RNA, 17 nt, Homo sapiens
cuguuugcaagaacuug

SEQ ID NO: 6472 - RNA, 17 nt, Homo sapiens
gcaagaacuuggauacu

SEQ ID NO: 6473 - RNA, 17 nt, Homo sapiens
uuggauacucuuuggaa

SEQ ID NO: 6474 - RNA, 17 nt, Homo sapiens
ggauacucuuuggaaau

SEQ ID NO: 6475 - RNA, 17 nt, Homo sapiens
uugaaugccaccauguu

SEQ ID NO: 6476 - RNA, 17 nt, Homo sapiens
ugaaugccaccauguuc

SEQ ID NO: 6477 - RNA, 17 nt, Homo sapiens
aaugccaccauguucuc

SEQ ID NO: 6478 - RNA, 17 nt, Homo sapiens
augccaccauguucucu

SEQ ID NO: 6479 - RNA, 17 nt, Homo sapiens
ccauguucucuaauagc

SEQ ID NO: 6480 - RNA, 17 nt, Homo sapiens
auguucucuaauagcac

SEQ ID NO: 6481 - RNA, 17 nt, Homo sapiens
cuaauagcacaaaugac

SEQ ID NO: 6482 - RNA, 17 nt, Homo sapiens
aauagcacaaaugacau

SEQ ID NO: 6483 - RNA, 17 nt, Homo sapiens
caaaugacauuuugauc

SEQ ID NO: 6484 - RNA, 17 nt, Homo sapiens
uuuugaucauggagcuu

SEQ ID NO: 6485 - RNA, 17 nt, Homo sapiens
cauggagcuuaagaaug

SEQ ID NO: 6486 - RNA, 17 nt, Homo sapiens
aagaaugcauccuugca

SEQ ID NO: 6487 - RNA, 17 nt, Homo sapiens
aaugcauccuugcagga

SEQ ID NO: 6488 - RNA, 17 nt, Homo sapiens
augcauccuugcaggac

SEQ ID NO: 6489 - RNA, 17 nt, Homo sapiens
auccuugcaggaccaag

SEQ ID NO: 6490 - RNA, 17 nt, Homo sapiens
ugcaggaccaaggagac

SEQ ID NO: 6491 - RNA, 17 nt, Homo sapiens
gcaggaccaaggagacu

SEQ ID NO: 6492 - RNA, 17 nt, Homo sapiens
aaggagacuaugucugc

SEQ ID NO: 6493 - RNA, 17 nt, Homo sapiens
acuaugucugccuugcu

SEQ ID NO: 6494 - RNA, 17 nt, Homo sapiens
augucugccuugcucaa

SEQ ID NO: 6495 - RNA, 17 nt, Homo sapiens
ugucugccuugcucaag

SEQ ID NO: 6496 - RNA, 17 nt, Homo sapiens
ugccuugcucaagacag

SEQ ID NO: 6497 - RNA, 17 nt, Homo sapiens
ccuugcucaagacagga

SEQ ID NO: 6498 - RNA, 17 nt, Homo sapiens
cucaagacaggaagacc

SEQ ID NO: 6499 - RNA, 17 nt, Homo sapiens
aggaagaccaagaaaag

SEQ ID NO: 6500 - RNA, 17 nt, Homo sapiens
ggaagaccaagaaaaga

SEQ ID NO: 6501 - RNA, 17 nt, Homo sapiens
gaaaagacauugcgugg

SEQ ID NO: 6502 - RNA, 17 nt, Homo sapiens
gcguggucaggcagcuc

SEQ ID NO: 6503 - RNA, 17 nt, Homo sapiens
ggucaggcagcucacag

SEQ ID NO: 6504 - RNA, 17 nt, Homo sapiens
caggcagcucacagucc

SEQ ID NO: 6505 - RNA, 17 nt, Homo sapiens
ggcagcucacaguccua

SEQ ID NO: 6506 - RNA, 17 nt, Homo sapiens
cagcucacaguccuaga

SEQ ID NO: 6507 - RNA, 17 nt, Homo sapiens
ucacaguccuagagcgu

SEQ ID NO: 6508 - RNA, 17 nt, Homo sapiens
cacaguccuagagcgug

SEQ ID NO: 6509 - RNA, 17 nt, Homo sapiens
cguguggcacccacgau

SEQ ID NO: 6510 - RNA, 17 nt, Homo sapiens
uguggcacccacgauca

SEQ ID NO: 6511 - RNA, 17 nt, Homo sapiens
guggcacccacgaucac

SEQ ID NO: 6512 - RNA, 17 nt, Homo sapiens
uggcacccacgaucaca

SEQ ID NO: 6513 - RNA, 17 nt, Homo sapiens
ccacgaucacaggaaac

SEQ ID NO: 6514 - RNA, 17 nt, Homo sapiens
acgaucacaggaaaccu

SEQ ID NO: 6515 - RNA, 17 nt, Homo sapiens
caggaaaccuggagaau

SEQ ID NO: 6516 - RNA, 17 nt, Homo sapiens
aggaaaccuggagaauc

SEQ ID NO: 6517 - RNA, 17 nt, Homo sapiens
ggagaaucagacgacaa

SEQ ID NO: 6518 - RNA, 17 nt, Homo sapiens
cagacgacaaguauugg

SEQ ID NO: 6519 - RNA, 17 nt, Homo sapiens
gggaaagcaucgaaguc

SEQ ID NO: 6520 - RNA, 17 nt, Homo sapiens
ucgaagucucaugcacg

SEQ ID NO: 6521 - RNA, 17 nt, Homo sapiens
gaagucucaugcacggc

SEQ ID NO: 6522 - RNA, 17 nt, Homo sapiens
ucucaugcacggcaucu

SEQ ID NO: 6523 - RNA, 17 nt, Homo sapiens
ugcacggcaucugggaa

SEQ ID NO: 6524 - RNA, 17 nt, Homo sapiens
acggcaucugggaaucc

SEQ ID NO: 6525 - RNA, 17 nt, Homo sapiens
ugggaaucccccuccac

SEQ ID NO: 6526 - RNA, 17 nt, Homo sapiens
gggaaucccccuccaca

SEQ ID NO: 6527 - RNA, 17 nt, Homo sapiens
ggaaucccccuccacag

SEQ ID NO: 6528 - RNA, 17 nt, Homo sapiens
gaaucccccuccacaga

SEQ ID NO: 6529 - RNA, 17 nt, Homo sapiens
aaucccccuccacagau

SEQ ID NO: 6530 - RNA, 17 nt, Homo sapiens
ucccccuccacagauca

SEQ ID NO: 6531 - RNA, 17 nt, Homo sapiens
cccccuccacagaucau

SEQ ID NO: 6532 - RNA, 17 nt, Homo sapiens
cccuccacagaucaugu

SEQ ID NO: 6533 - RNA, 17 nt, Homo sapiens
cacagaucaugugguuu

SEQ ID NO: 6534 - RNA, 17 nt, Homo sapiens
aaugagacccuuguaga

SEQ ID NO: 6535 - RNA, 17 nt, Homo sapiens
augagacccuuguagaa

SEQ ID NO: 6536 - RNA, 17 nt, Homo sapiens
ugagacccuuguagaag

SEQ ID NO: 6537 - RNA, 17 nt, Homo sapiens
uagaagacucaggcauu

SEQ ID NO: 6538 - RNA, 17 nt, Homo sapiens
gaagacucaggcauugu

SEQ ID NO: 6539 - RNA, 17 nt, Homo sapiens
acucaggcauuguauug

SEQ ID NO: 6540 - RNA, 17 nt, Homo sapiens
augggaaccggaaccuc

SEQ ID NO: 6541 - RNA, 17 nt, Homo sapiens
accggaaccucacuauc

SEQ ID NO: 6542 - RNA, 17 nt, Homo sapiens
ccggaaccucacuaucc

SEQ ID NO: 6543 - RNA, 17 nt, Homo sapiens
ggaaccucacuauccgc

SEQ ID NO: 6544 - RNA, 17 nt, Homo sapiens
aaccucacuauccgcag

SEQ ID NO: 6545 - RNA, 17 nt, Homo sapiens
ucacuauccgcagagug

SEQ ID NO: 6546 - RNA, 17 nt, Homo sapiens
cuauccgcagagugagg

SEQ ID NO: 6547 - RNA, 17 nt, Homo sapiens
acgaaggccucuacacc

SEQ ID NO: 6548 - RNA, 17 nt, Homo sapiens
cgaaggccucuacaccu

SEQ ID NO: 6549 - RNA, 17 nt, Homo sapiens
aaggccucuacaccugc

SEQ ID NO: 6550 - RNA, 17 nt, Homo sapiens
gccucuacaccugccag

SEQ ID NO: 6551 - RNA, 17 nt, Homo sapiens
cucuacaccugccaggc

SEQ ID NO: 6552 - RNA, 17 nt, Homo sapiens
ucuacaccugccaggca

SEQ ID NO: 6553 - RNA, 17 nt, Homo sapiens
acaccugccaggcaugc

SEQ ID NO: 6554 - RNA, 17 nt, Homo sapiens
caccugccaggcaugca

SEQ ID NO: 6555 - RNA, 17 nt, Homo sapiens
ugccaggcaugcagugu

SEQ ID NO: 6556 - RNA, 17 nt, Homo sapiens
aggcaugcaguguucuu

SEQ ID NO: 6557 - RNA, 17 nt, Homo sapiens
caguguucuuggcugug

SEQ ID NO: 6558 - RNA, 17 nt, Homo sapiens
uucuuggcugugcaaaa

SEQ ID NO: 6559 - RNA, 17 nt, Homo sapiens
ggcugugcaaaagugga

SEQ ID NO: 6560 - RNA, 17 nt, Homo sapiens
guggaggcauuuuucau

SEQ ID NO: 6561 - RNA, 17 nt, Homo sapiens
cauuuuucauaauagaa

SEQ ID NO: 6562 - RNA, 17 nt, Homo sapiens
gaaggugcccaggaaaa

SEQ ID NO: 6563 - RNA, 17 nt, Homo sapiens
aaggugcccaggaaaag

SEQ ID NO: 6564 - RNA, 17 nt, Homo sapiens
aggugcccaggaaaaga

SEQ ID NO: 6565 - RNA, 17 nt, Homo sapiens
agacgaacuuggaaauc

SEQ ID NO: 6566 - RNA, 17 nt, Homo sapiens
uggaaaucauuauucua

SEQ ID NO: 6567 - RNA, 17 nt, Homo sapiens
cauuauucuaguaggca

SEQ ID NO: 6568 - RNA, 17 nt, Homo sapiens
uaguaggcacgacggug

SEQ ID NO: 6569 - RNA, 17 nt, Homo sapiens
gugauugccauguucuu

SEQ ID NO: 6570 - RNA, 17 nt, Homo sapiens
ugauugccauguucuuc

SEQ ID NO: 6571 - RNA, 17 nt, Homo sapiens
ccauguucuucuggcua

SEQ ID NO: 6572 - RNA, 17 nt, Homo sapiens
uguucuucuggcuacuu

SEQ ID NO: 6573 - RNA, 17 nt, Homo sapiens
cuucuggcuacuucuug

SEQ ID NO: 6574 - RNA, 17 nt, Homo sapiens
cuggcuacuucuuguca

SEQ ID NO: 6575 - RNA, 17 nt, Homo sapiens
gcuacuucuugucauca

SEQ ID NO: 6576 - RNA, 17 nt, Homo sapiens
uucuugucaucauccua

SEQ ID NO: 6577 - RNA, 17 nt, Homo sapiens
uugucaucauccuaggg

SEQ ID NO: 6578 - RNA, 17 nt, Homo sapiens
ucaucauccuagggacc

SEQ ID NO: 6579 - RNA, 17 nt, Homo sapiens
caucauccuagggaccg

SEQ ID NO: 6580 - RNA, 17 nt, Homo sapiens
cuagggaccguuaagcg

SEQ ID NO: 6581 - RNA, 17 nt, Homo sapiens
aagcgggccaauggagg

SEQ ID NO: 6582 - RNA, 17 nt, Homo sapiens
agcgggccaauggaggg

SEQ ID NO: 6583 - RNA, 17 nt, Homo sapiens
aggggaacugaagacag

SEQ ID NO: 6584 - RNA, 17 nt, Homo sapiens
cugaagacaggcuacuu

SEQ ID NO: 6585 - RNA, 17 nt, Homo sapiens
agacaggcuacuugucc

SEQ ID NO: 6586 - RNA, 17 nt, Homo sapiens
caggcuacuuguccauc

SEQ ID NO: 6587 - RNA, 17 nt, Homo sapiens
uacuuguccaucgucau

SEQ ID NO: 6588 - RNA, 17 nt, Homo sapiens
acuuguccaucgucaug

SEQ ID NO: 6589 - RNA, 17 nt, Homo sapiens
ccaucgucauggaucca

SEQ ID NO: 6590 - RNA, 17 nt, Homo sapiens
cauggauccagaugaac

SEQ ID NO: 6591 - RNA, 17 nt, Homo sapiens
auggauccagaugaacu

SEQ ID NO: 6592 - RNA, 17 nt, Homo sapiens
agaugaacucccauugg

SEQ ID NO: 6593 - RNA, 17 nt, Homo sapiens
augaacucccauuggau

SEQ ID NO: 6594 - RNA, 17 nt, Homo sapiens
ugaacucccauuggaug

SEQ ID NO: 6595 - RNA, 17 nt, Homo sapiens
gaacucccauuggauga

SEQ ID NO: 6596 - RNA, 17 nt, Homo sapiens
ggaugaacauugugaac

SEQ ID NO: 6597 - RNA, 17 nt, Homo sapiens
ugaacgacugccuuaug

SEQ ID NO: 6598 - RNA, 17 nt, Homo sapiens
acgacugccuuaugaug

SEQ ID NO: 6599 - RNA, 17 nt, Homo sapiens
cgacugccuuaugaugc

SEQ ID NO: 6600 - RNA, 17 nt, Homo sapiens
uaugaugccagcaaaug

SEQ ID NO: 6601 - RNA, 17 nt, Homo sapiens
augaugccagcaaaugg

SEQ ID NO: 6602 - RNA, 17 nt, Homo sapiens
augccagcaaaugggaa

SEQ ID NO: 6603 - RNA, 17 nt, Homo sapiens
gggaauuccccagagac

SEQ ID NO: 6604 - RNA, 17 nt, Homo sapiens
ggaauuccccagagacc

SEQ ID NO: 6605 - RNA, 17 nt, Homo sapiens
gaauuccccagagaccg

SEQ ID NO: 6606 - RNA, 17 nt, Homo sapiens
aauuccccagagaccgg

SEQ ID NO: 6607 - RNA, 17 nt, Homo sapiens
ccagagaccggcugaac

SEQ ID NO: 6608 - RNA, 17 nt, Homo sapiens
agaccggcugaaccuag

SEQ ID NO: 6609 - RNA, 17 nt, Homo sapiens
ggcugaaccuagguaag

SEQ ID NO: 6610 - RNA, 17 nt, Homo sapiens
gcugaaccuagguaagc

SEQ ID NO: 6611 - RNA, 17 nt, Homo sapiens
agguaagccucuuggcc

SEQ ID NO: 6612 - RNA, 17 nt, Homo sapiens
gguaagccucuuggccg

SEQ ID NO: 6613 - RNA, 17 nt, Homo sapiens
uaagccucuuggccgug

SEQ ID NO: 6614 - RNA, 17 nt, Homo sapiens
cucuuggccguggugcc

SEQ ID NO: 6615 - RNA, 17 nt, Homo sapiens
cguggugccuuuggcca

SEQ ID NO: 6616 - RNA, 17 nt, Homo sapiens
guggugccuuuggccaa

SEQ ID NO: 6617 - RNA, 17 nt, Homo sapiens
ccuuuggccaagagauu

SEQ ID NO: 6618 - RNA, 17 nt, Homo sapiens
cuuuggccaagagauug

SEQ ID NO: 6619 - RNA, 17 nt, Homo sapiens
auugaagcagaugccuu

SEQ ID NO: 6620 - RNA, 17 nt, Homo sapiens
gcagaugccuuuggaau

SEQ ID NO: 6621 - RNA, 17 nt, Homo sapiens
cagaugccuuuggaauu

SEQ ID NO: 6622 - RNA, 17 nt, Homo sapiens
gaauugacaagacagca

SEQ ID NO: 6623 - RNA, 17 nt, Homo sapiens
gacaagacagcaacuug

SEQ ID NO: 6624 - RNA, 17 nt, Homo sapiens
aagacagcaacuugcag

SEQ ID NO: 6625 - RNA, 17 nt, Homo sapiens
acagcaacuugcaggac

SEQ ID NO: 6626 - RNA, 17 nt, Homo sapiens
caacuugcaggacagua

SEQ ID NO: 6627 - RNA, 17 nt, Homo sapiens
ugcaggacaguagcagu

SEQ ID NO: 6628 - RNA, 17 nt, Homo sapiens
acaguagcagucaaaau

SEQ ID NO: 6629 - RNA, 17 nt, Homo sapiens
uagcagucaaaauguug

SEQ ID NO: 6630 - RNA, 17 nt, Homo sapiens
gaaggagcaacacacag

SEQ ID NO: 6631 - RNA, 17 nt, Homo sapiens
ggagcaacacacaguga

SEQ ID NO: 6632 - RNA, 17 nt, Homo sapiens
agcaacacacagugagc

SEQ ID NO: 6633 - RNA, 17 nt, Homo sapiens
caacacacagugagcau

SEQ ID NO: 6634 - RNA, 17 nt, Homo sapiens
cagugagcaucgagcuc

SEQ ID NO: 6635 - RNA, 17 nt, Homo sapiens
caucgagcucucauguc

SEQ ID NO: 6636 - RNA, 17 nt, Homo sapiens
ucgagcucucaugucug

SEQ ID NO: 6637 - RNA, 17 nt, Homo sapiens
gagcucucaugucugaa

SEQ ID NO: 6638 - RNA, 17 nt, Homo sapiens
cucaugucugaacucaa

SEQ ID NO: 6639 - RNA, 17 nt, Homo sapiens
gucugaacucaagaucc

SEQ ID NO: 6640 - RNA, 17 nt, Homo sapiens
cugaacucaagauccuc

SEQ ID NO: 6641 - RNA, 17 nt, Homo sapiens
ucaagauccucauucau

SEQ ID NO: 6642 - RNA, 17 nt, Homo sapiens
caagauccucauucaua

SEQ ID NO: 6643 - RNA, 17 nt, Homo sapiens
agauccucauucauauu

SEQ ID NO: 6644 - RNA, 17 nt, Homo sapiens
ccucauucauauugguc

SEQ ID NO: 6645 - RNA, 17 nt, Homo sapiens
uauuggucaccaucuca

SEQ ID NO: 6646 - RNA, 17 nt, Homo sapiens
uuggucaccaucucaau

SEQ ID NO: 6647 - RNA, 17 nt, Homo sapiens
uggucaccaucucaaug

SEQ ID NO: 6648 - RNA, 17 nt, Homo sapiens
ucaccaucucaaugugg

SEQ ID NO: 6649 - RNA, 17 nt, Homo sapiens
accaucucaaugugguc

SEQ ID NO: 6650 - RNA, 17 nt, Homo sapiens
auguggucaaccuucua

SEQ ID NO: 6651 - RNA, 17 nt, Homo sapiens
uggucaaccuucuaggu

SEQ ID NO: 6652 - RNA, 17 nt, Homo sapiens
ggucaaccuucuaggug

SEQ ID NO: 6653 - RNA, 17 nt, Homo sapiens
caaccuucuaggugccu

SEQ ID NO: 6654 - RNA, 17 nt, Homo sapiens
cuaggugccuguaccaa

SEQ ID NO: 6655 - RNA, 17 nt, Homo sapiens
uaggugccuguaccaag

SEQ ID NO: 6656 - RNA, 17 nt, Homo sapiens
gccuguaccaagccagg

SEQ ID NO: 6657 - RNA, 17 nt, Homo sapiens
ccuguaccaagccagga

SEQ ID NO: 6658 - RNA, 17 nt, Homo sapiens
uaccaagccaggagggc

SEQ ID NO: 6659 - RNA, 17 nt, Homo sapiens
accaagccaggagggcc

SEQ ID NO: 6660 - RNA, 17 nt, Homo sapiens
aggagggccacucaugg

SEQ ID NO: 6661 - RNA, 17 nt, Homo sapiens
ggagggccacucauggu

SEQ ID NO: 6662 - RNA, 17 nt, Homo sapiens
agggccacucaugguga

SEQ ID NO: 6663 - RNA, 17 nt, Homo sapiens
ggccacucauggugauu

SEQ ID NO: 6664 - RNA, 17 nt, Homo sapiens
uggaauucugcaaauuu

SEQ ID NO: 6665 - RNA, 17 nt, Homo sapiens
aauucugcaaauuugga

SEQ ID NO: 6666 - RNA, 17 nt, Homo sapiens
uuggaaaccuguccacu

SEQ ID NO: 6667 - RNA, 17 nt, Homo sapiens
uggaaaccuguccacuu

SEQ ID NO: 6668 - RNA, 17 nt, Homo sapiens
aaccuguccacuuaccu

SEQ ID NO: 6669 - RNA, 17 nt, Homo sapiens
accuguccacuuaccug

SEQ ID NO: 6670 - RNA, 17 nt, Homo sapiens
cuguccacuuaccugag

SEQ ID NO: 6671 - RNA, 17 nt, Homo sapiens
ccacuuaccugaggagc

SEQ ID NO: 6672 - RNA, 17 nt, Homo sapiens
cacuuaccugaggagca

SEQ ID NO: 6673 - RNA, 17 nt, Homo sapiens
ugaggagcaagagaaau

SEQ ID NO: 6674 - RNA, 17 nt, Homo sapiens
aauuuguccccuacaag

SEQ ID NO: 6675 - RNA, 17 nt, Homo sapiens
auuuguccccuacaaga

SEQ ID NO: 6676 - RNA, 17 nt, Homo sapiens
uuuguccccuacaagac

SEQ ID NO: 6677 - RNA, 17 nt, Homo sapiens
uuguccccuacaagacc

SEQ ID NO: 6678 - RNA, 17 nt, Homo sapiens
uccccuacaagaccaaa

SEQ ID NO: 6679 - RNA, 17 nt, Homo sapiens
uacaagaccaaaggggc

SEQ ID NO: 6680 - RNA, 17 nt, Homo sapiens
acaagaccaaaggggca

SEQ ID NO: 6681 - RNA, 17 nt, Homo sapiens
aaaggggcacgauuccg

SEQ ID NO: 6682 - RNA, 17 nt, Homo sapiens
cacgauuccgucaaggg

SEQ ID NO: 6683 - RNA, 17 nt, Homo sapiens
auuccgucaagggaaag

SEQ ID NO: 6684 - RNA, 17 nt, Homo sapiens
ggaaagacuacguugga

SEQ ID NO: 6685 - RNA, 17 nt, Homo sapiens
guuggagcaaucccugu

SEQ ID NO: 6686 - RNA, 17 nt, Homo sapiens
gagcaaucccuguggau

SEQ ID NO: 6687 - RNA, 17 nt, Homo sapiens
agcaaucccuguggauc

SEQ ID NO: 6688 - RNA, 17 nt, Homo sapiens
gcaaucccuguggaucu

SEQ ID NO: 6689 - RNA, 17 nt, Homo sapiens
uguggaucugaaacggc

SEQ ID NO: 6690 - RNA, 17 nt, Homo sapiens
aacggcgcuuggacagc

SEQ ID NO: 6691 - RNA, 17 nt, Homo sapiens
gcuuggacagcaucacc

SEQ ID NO: 6692 - RNA, 17 nt, Homo sapiens
uggacagcaucaccagu

SEQ ID NO: 6693 - RNA, 17 nt, Homo sapiens
acagcaucaccaguagc

SEQ ID NO: 6694 - RNA, 17 nt, Homo sapiens
agcaucaccaguagcca

SEQ ID NO: 6695 - RNA, 17 nt, Homo sapiens
gcaucaccaguagccag

SEQ ID NO: 6696 - RNA, 17 nt, Homo sapiens
ccaguagccagagcuca

SEQ ID NO: 6697 - RNA, 17 nt, Homo sapiens
caguagccagagcucag

SEQ ID NO: 6698 - RNA, 17 nt, Homo sapiens
gccagagcucagccagc

SEQ ID NO: 6699 - RNA, 17 nt, Homo sapiens
cagagcucagccagcuc

SEQ ID NO: 6700 - RNA, 17 nt, Homo sapiens
agcucagccagcucugg

SEQ ID NO: 6701 - RNA, 17 nt, Homo sapiens
gcucagccagcucugga

SEQ ID NO: 6702 - RNA, 17 nt, Homo sapiens
cagccagcucuggauuu

SEQ ID NO: 6703 - RNA, 17 nt, Homo sapiens
gccagcucuggauuugu

SEQ ID NO: 6704 - RNA, 17 nt, Homo sapiens
gagaagucccucaguga

SEQ ID NO: 6705 - RNA, 17 nt, Homo sapiens
agaagucccucagugau

SEQ ID NO: 6706 - RNA, 17 nt, Homo sapiens
gaagucccucagugaug

SEQ ID NO: 6707 - RNA, 17 nt, Homo sapiens
agucccucagugaugua

SEQ ID NO: 6708 - RNA, 17 nt, Homo sapiens
gaggaagcuccugaaga

SEQ ID NO: 6709 - RNA, 17 nt, Homo sapiens
ggaagcuccugaagauc

SEQ ID NO: 6710 - RNA, 17 nt, Homo sapiens
gaagcuccugaagaucu

SEQ ID NO: 6711 - RNA, 17 nt, Homo sapiens
ugaagaucuguauaagg

SEQ ID NO: 6712 - RNA, 17 nt, Homo sapiens
auaaggacuuccugacc

SEQ ID NO: 6713 - RNA, 17 nt, Homo sapiens
aggacuuccugaccuug

SEQ ID NO: 6714 - RNA, 17 nt, Homo sapiens
ggacuuccugaccuugg

SEQ ID NO: 6715 - RNA, 17 nt, Homo sapiens
uuccugaccuuggagca

SEQ ID NO: 6716 - RNA, 17 nt, Homo sapiens
uccugaccuuggagcau

SEQ ID NO: 6717 - RNA, 17 nt, Homo sapiens
cuuggagcaucucaucu

SEQ ID NO: 6718 - RNA, 17 nt, Homo sapiens
ggagcaucucaucuguu

SEQ ID NO: 6719 - RNA, 17 nt, Homo sapiens
agcaucucaucuguuac

SEQ ID NO: 6720 - RNA, 17 nt, Homo sapiens
aucucaucuguuacagc

SEQ ID NO: 6721 - RNA, 17 nt, Homo sapiens
ucuguuacagcuuccaa

SEQ ID NO: 6722 - RNA, 17 nt, Homo sapiens
guuacagcuuccaagug

SEQ ID NO: 6723 - RNA, 17 nt, Homo sapiens
acagcuuccaaguggcu

SEQ ID NO: 6724 - RNA, 17 nt, Homo sapiens
cagcuuccaaguggcua

SEQ ID NO: 6725 - RNA, 17 nt, Homo sapiens
caaguggcuaagggcau

SEQ ID NO: 6726 - RNA, 17 nt, Homo sapiens
cuaagggcauggaguuc

SEQ ID NO: 6727 - RNA, 17 nt, Homo sapiens
uggaguucuuggcaucg

SEQ ID NO: 6728 - RNA, 17 nt, Homo sapiens
uucuuggcaucgcgaaa

SEQ ID NO: 6729 - RNA, 17 nt, Homo sapiens
aguguauccacagggac

SEQ ID NO: 6730 - RNA, 17 nt, Homo sapiens
guguauccacagggacc

SEQ ID NO: 6731 - RNA, 17 nt, Homo sapiens
guauccacagggaccug

SEQ ID NO: 6732 - RNA, 17 nt, Homo sapiens
acagggaccuggcggca

SEQ ID NO: 6733 - RNA, 17 nt, Homo sapiens
cagggaccuggcggcac

SEQ ID NO: 6734 - RNA, 17 nt, Homo sapiens
cuggcggcacgaaauau

SEQ ID NO: 6735 - RNA, 17 nt, Homo sapiens
gaaauauccucuuaucg

SEQ ID NO: 6736 - RNA, 17 nt, Homo sapiens
aaauauccucuuaucgg

SEQ ID NO: 6737 - RNA, 17 nt, Homo sapiens
auauccucuuaucggag

SEQ ID NO: 6738 - RNA, 17 nt, Homo sapiens
uuaaaaucugugacuuu

SEQ ID NO: 6739 - RNA, 17 nt, Homo sapiens
ucugugacuuuggcuug

SEQ ID NO: 6740 - RNA, 17 nt, Homo sapiens
acuuuggcuuggcccgg

SEQ ID NO: 6741 - RNA, 17 nt, Homo sapiens
ggcuuggcccgggauau

SEQ ID NO: 6742 - RNA, 17 nt, Homo sapiens
gcuuggcccgggauauu

SEQ ID NO: 6743 - RNA, 17 nt, Homo sapiens
uaaagauccagauuaug

SEQ ID NO: 6744 - RNA, 17 nt, Homo sapiens
aaagauccagauuaugu

SEQ ID NO: 6745 - RNA, 17 nt, Homo sapiens
auuaugucagaaaagga

SEQ ID NO: 6746 - RNA, 17 nt, Homo sapiens
ggagaugcucgccuccc

SEQ ID NO: 6747 - RNA, 17 nt, Homo sapiens
augcucgccucccuuug

SEQ ID NO: 6748 - RNA, 17 nt, Homo sapiens
ugcucgccucccuuuga

SEQ ID NO: 6749 - RNA, 17 nt, Homo sapiens
cucgccucccuuugaaa

SEQ ID NO: 6750 - RNA, 17 nt, Homo sapiens
ucgccucccuuugaaau

SEQ ID NO: 6751 - RNA, 17 nt, Homo sapiens
cgccucccuuugaaaug

SEQ ID NO: 6752 - RNA, 17 nt, Homo sapiens
uggauggccccagaaac

SEQ ID NO: 6753 - RNA, 17 nt, Homo sapiens
ggauggccccagaaaca

SEQ ID NO: 6754 - RNA, 17 nt, Homo sapiens
gauggccccagaaacaa

SEQ ID NO: 6755 - RNA, 17 nt, Homo sapiens
auggccccagaaacaau

SEQ ID NO: 6756 - RNA, 17 nt, Homo sapiens
ccagaaacaauuuuuga

SEQ ID NO: 6757 - RNA, 17 nt, Homo sapiens
uuuuugacagaguguac

SEQ ID NO: 6758 - RNA, 17 nt, Homo sapiens
gaguguacacaauccag

SEQ ID NO: 6759 - RNA, 17 nt, Homo sapiens
guguacacaauccagag

SEQ ID NO: 6760 - RNA, 17 nt, Homo sapiens
acacaauccagagugac

SEQ ID NO: 6761 - RNA, 17 nt, Homo sapiens
cacaauccagagugacg

SEQ ID NO: 6762 - RNA, 17 nt, Homo sapiens
gugacgucuggucuuuu

SEQ ID NO: 6763 - RNA, 17 nt, Homo sapiens
gucuggucuuuuggugu

SEQ ID NO: 6764 - RNA, 17 nt, Homo sapiens
uguuuugcugugggaaa

SEQ ID NO: 6765 - RNA, 17 nt, Homo sapiens
auauuuuccuuaggugc

SEQ ID NO: 6766 - RNA, 17 nt, Homo sapiens
uauuuuccuuaggugcu

SEQ ID NO: 6767 - RNA, 17 nt, Homo sapiens
uuaggugcuucuccaua

SEQ ID NO: 6768 - RNA, 17 nt, Homo sapiens
ggugcuucuccauaucc

SEQ ID NO: 6769 - RNA, 17 nt, Homo sapiens
ugcuucuccauauccug

SEQ ID NO: 6770 - RNA, 17 nt, Homo sapiens
gcuucuccauauccugg

SEQ ID NO: 6771 - RNA, 17 nt, Homo sapiens
uccauauccugggguaa

SEQ ID NO: 6772 - RNA, 17 nt, Homo sapiens
ccauauccugggguaaa

SEQ ID NO: 6773 - RNA, 17 nt, Homo sapiens
gaaggaacuagaaugag

SEQ ID NO: 6774 - RNA, 17 nt, Homo sapiens
augagggccccugauua

SEQ ID NO: 6775 - RNA, 17 nt, Homo sapiens
ugagggccccugauuau

SEQ ID NO: 6776 - RNA, 17 nt, Homo sapiens
gagggccccugauuaua

SEQ ID NO: 6777 - RNA, 17 nt, Homo sapiens
agggccccugauuauac

SEQ ID NO: 6778 - RNA, 17 nt, Homo sapiens
gauuauacuacaccaga

SEQ ID NO: 6779 - RNA, 17 nt, Homo sapiens
uauacuacaccagaaau

SEQ ID NO: 6780 - RNA, 17 nt, Homo sapiens
uacuacaccagaaaugu

SEQ ID NO: 6781 - RNA, 17 nt, Homo sapiens
acuacaccagaaaugua

SEQ ID NO: 6782 - RNA, 17 nt, Homo sapiens
aaauguaccagaccaug

SEQ ID NO: 6783 - RNA, 17 nt, Homo sapiens
aauguaccagaccaugc

SEQ ID NO: 6784 - RNA, 17 nt, Homo sapiens
uaccagaccaugcugga

SEQ ID NO: 6785 - RNA, 17 nt, Homo sapiens
accagaccaugcuggac

SEQ ID NO: 6786 - RNA, 17 nt, Homo sapiens
gaccaugcuggacugcu

SEQ ID NO: 6787 - RNA, 17 nt, Homo sapiens
uggacugcuggcacggg

SEQ ID NO: 6788 - RNA, 17 nt, Homo sapiens
cugcuggcacggggagc

SEQ ID NO: 6789 - RNA, 17 nt, Homo sapiens
cggggagcccagucaga

SEQ ID NO: 6790 - RNA, 17 nt, Homo sapiens
ggggagcccagucagag

SEQ ID NO: 6791 - RNA, 17 nt, Homo sapiens
gggagcccagucagaga

SEQ ID NO: 6792 - RNA, 17 nt, Homo sapiens
gcccagucagagaccca

SEQ ID NO: 6793 - RNA, 17 nt, Homo sapiens
ucagagacccacguuuu

SEQ ID NO: 6794 - RNA, 17 nt, Homo sapiens
cagagacccacguuuuc

SEQ ID NO: 6795 - RNA, 17 nt, Homo sapiens
agagacccacguuuuca

SEQ ID NO: 6796 - RNA, 17 nt, Homo sapiens
acguuuucagaguuggu

SEQ ID NO: 6797 - RNA, 17 nt, Homo sapiens
gguggaacauuugggaa

SEQ ID NO: 6798 - RNA, 17 nt, Homo sapiens
gggaaaucucuugcaag

SEQ ID NO: 6799 - RNA, 17 nt, Homo sapiens
gaaaucucuugcaagcu

SEQ ID NO: 6800 - RNA, 17 nt, Homo sapiens
ucucuugcaagcuaaug

SEQ ID NO: 6801 - RNA, 17 nt, Homo sapiens
uugcaagcuaaugcuca

SEQ ID NO: 6802 - RNA, 17 nt, Homo sapiens
gcuaaugcucagcagga

SEQ ID NO: 6803 - RNA, 17 nt, Homo sapiens
uaaugcucagcaggaug

SEQ ID NO: 6804 - RNA, 17 nt, Homo sapiens
ugcucagcaggauggca

SEQ ID NO: 6805 - RNA, 17 nt, Homo sapiens
aggauggcaaagacuac

SEQ ID NO: 6806 - RNA, 17 nt, Homo sapiens
gcaaagacuacauuguu

SEQ ID NO: 6807 - RNA, 17 nt, Homo sapiens
aagacuacauuguucuu

SEQ ID NO: 6808 - RNA, 17 nt, Homo sapiens
cauuguucuuccgauau

SEQ ID NO: 6809 - RNA, 17 nt, Homo sapiens
uguucuuccgauaucag

SEQ ID NO: 6810 - RNA, 17 nt, Homo sapiens
ccgauaucagagacuuu

SEQ ID NO: 6811 - RNA, 17 nt, Homo sapiens
ucagagacuuugagcau

SEQ ID NO: 6812 - RNA, 17 nt, Homo sapiens
cuuugagcauggaagag

SEQ ID NO: 6813 - RNA, 17 nt, Homo sapiens
gaggauucuggacucuc

SEQ ID NO: 6814 - RNA, 17 nt, Homo sapiens
uucuggacucucucugc

SEQ ID NO: 6815 - RNA, 17 nt, Homo sapiens
cuggacucucucugccu

SEQ ID NO: 6816 - RNA, 17 nt, Homo sapiens
ggacucucucugccuac

SEQ ID NO: 6817 - RNA, 17 nt, Homo sapiens
acucucucugccuaccu

SEQ ID NO: 6818 - RNA, 17 nt, Homo sapiens
cucucugccuaccucac

SEQ ID NO: 6819 - RNA, 17 nt, Homo sapiens
ucucugccuaccucacc

SEQ ID NO: 6820 - RNA, 17 nt, Homo sapiens
cugccuaccucaccugu

SEQ ID NO: 6821 - RNA, 17 nt, Homo sapiens
ugccuaccucaccuguu

SEQ ID NO: 6822 - RNA, 17 nt, Homo sapiens
ccuaccucaccuguuuc

SEQ ID NO: 6823 - RNA, 17 nt, Homo sapiens
uaccucaccuguuuccu

SEQ ID NO: 6824 - RNA, 17 nt, Homo sapiens
accucaccuguuuccug

SEQ ID NO: 6825 - RNA, 17 nt, Homo sapiens
ccuguuuccuguaugga

SEQ ID NO: 6826 - RNA, 17 nt, Homo sapiens
cuguuuccuguauggag

SEQ ID NO: 6827 - RNA, 17 nt, Homo sapiens
uaugugaccccaaauuc

SEQ ID NO: 6828 - RNA, 17 nt, Homo sapiens
augugaccccaaauucc

SEQ ID NO: 6829 - RNA, 17 nt, Homo sapiens
ugugaccccaaauucca

SEQ ID NO: 6830 - RNA, 17 nt, Homo sapiens
gugaccccaaauuccau

SEQ ID NO: 6831 - RNA, 17 nt, Homo sapiens
ccaaauuccauuaugac

SEQ ID NO: 6832 - RNA, 17 nt, Homo sapiens
caaauuccauuaugaca

SEQ ID NO: 6833 - RNA, 17 nt, Homo sapiens
auuaugacaacacagca

SEQ ID NO: 6834 - RNA, 17 nt, Homo sapiens
augacaacacagcagga

SEQ ID NO: 6835 - RNA, 17 nt, Homo sapiens
gacaacacagcaggaau

SEQ ID NO: 6836 - RNA, 17 nt, Homo sapiens
aacacagcaggaaucag

SEQ ID NO: 6837 - RNA, 17 nt, Homo sapiens
caggaaucagucaguau

SEQ ID NO: 6838 - RNA, 17 nt, Homo sapiens
aaucagucaguaucugc

SEQ ID NO: 6839 - RNA, 17 nt, Homo sapiens
ucaguaucugcagaaca

SEQ ID NO: 6840 - RNA, 17 nt, Homo sapiens
guaucugcagaacagua

SEQ ID NO: 6841 - RNA, 17 nt, Homo sapiens
ugcagaacaguaagcga

SEQ ID NO: 6842 - RNA, 17 nt, Homo sapiens
gaaagagccggccugug

SEQ ID NO: 6843 - RNA, 17 nt, Homo sapiens
gagccggccugugagug

SEQ ID NO: 6844 - RNA, 17 nt, Homo sapiens
agccggccugugagugu

SEQ ID NO: 6845 - RNA, 17 nt, Homo sapiens
guaaaaacauuugaaga

SEQ ID NO: 6846 - RNA, 17 nt, Homo sapiens
aagauaucccguuagaa

SEQ ID NO: 6847 - RNA, 17 nt, Homo sapiens
agauaucccguuagaag

SEQ ID NO: 6848 - RNA, 17 nt, Homo sapiens
agaagaaccagaaguaa

SEQ ID NO: 6849 - RNA, 17 nt, Homo sapiens
gaagaaccagaaguaaa

SEQ ID NO: 6850 - RNA, 17 nt, Homo sapiens
aaguaaucccagaugac

SEQ ID NO: 6851 - RNA, 17 nt, Homo sapiens
aguaaucccagaugaca

SEQ ID NO: 6852 - RNA, 17 nt, Homo sapiens
guaaucccagaugacaa

SEQ ID NO: 6853 - RNA, 17 nt, Homo sapiens
cagaugacaaccagacg

SEQ ID NO: 6854 - RNA, 17 nt, Homo sapiens
augacaaccagacggac

SEQ ID NO: 6855 - RNA, 17 nt, Homo sapiens
ugacaaccagacggaca

SEQ ID NO: 6856 - RNA, 17 nt, Homo sapiens
agacggacagugguaug

SEQ ID NO: 6857 - RNA, 17 nt, Homo sapiens
uaugguucuugccucag

SEQ ID NO: 6858 - RNA, 17 nt, Homo sapiens
guucuugccucagaaga

SEQ ID NO: 6859 - RNA, 17 nt, Homo sapiens
uucuugccucagaagag

SEQ ID NO: 6860 - RNA, 17 nt, Homo sapiens
cuugccucagaagagcu

SEQ ID NO: 6861 - RNA, 17 nt, Homo sapiens
agaagagcugaaaacuu

SEQ ID NO: 6862 - RNA, 17 nt, Homo sapiens
cugaaaacuuuggaaga

SEQ ID NO: 6863 - RNA, 17 nt, Homo sapiens
uggaagacagaaccaaa

SEQ ID NO: 6864 - RNA, 17 nt, Homo sapiens
gacagaaccaaauuauc

SEQ ID NO: 6865 - RNA, 17 nt, Homo sapiens
acagaaccaaauuaucu

SEQ ID NO: 6866 - RNA, 17 nt, Homo sapiens
aaauuaucuccaucuuu

SEQ ID NO: 6867 - RNA, 17 nt, Homo sapiens
auuaucuccaucuuuug

SEQ ID NO: 6868 - RNA, 17 nt, Homo sapiens
uuaucuccaucuuuugg

SEQ ID NO: 6869 - RNA, 17 nt, Homo sapiens
ucuccaucuuuuggugg

SEQ ID NO: 6870 - RNA, 17 nt, Homo sapiens
aauggugcccagcaaaa

SEQ ID NO: 6871 - RNA, 17 nt, Homo sapiens
auggugcccagcaaaag

SEQ ID NO: 6872 - RNA, 17 nt, Homo sapiens
uggugcccagcaaaagc

SEQ ID NO: 6873 - RNA, 17 nt, Homo sapiens
ugcccagcaaaagcagg

SEQ ID NO: 6874 - RNA, 17 nt, Homo sapiens
gcaaaagcagggagucu

SEQ ID NO: 6875 - RNA, 17 nt, Homo sapiens
agggagucuguggcauc

SEQ ID NO: 6876 - RNA, 17 nt, Homo sapiens
ucuguggcaucugaagg

SEQ ID NO: 6877 - RNA, 17 nt, Homo sapiens
guggcaucugaaggcuc

SEQ ID NO: 6878 - RNA, 17 nt, Homo sapiens
cugaaggcucaaaccag

SEQ ID NO: 6879 - RNA, 17 nt, Homo sapiens
gaaggcucaaaccagac

SEQ ID NO: 6880 - RNA, 17 nt, Homo sapiens
gcucaaaccagacaagc

SEQ ID NO: 6881 - RNA, 17 nt, Homo sapiens
cucaaaccagacaagcg

SEQ ID NO: 6882 - RNA, 17 nt, Homo sapiens
aaccagacaagcggcua

SEQ ID NO: 6883 - RNA, 17 nt, Homo sapiens
caagcggcuaccagucc

SEQ ID NO: 6884 - RNA, 17 nt, Homo sapiens
gcggcuaccaguccgga

SEQ ID NO: 6885 - RNA, 17 nt, Homo sapiens
cggcuaccaguccggau

SEQ ID NO: 6886 - RNA, 17 nt, Homo sapiens
uaccaguccggauauca

SEQ ID NO: 6887 - RNA, 17 nt, Homo sapiens
cggauaucacuccgaug

SEQ ID NO: 6888 - RNA, 17 nt, Homo sapiens
gauaucacuccgaugac

SEQ ID NO: 6889 - RNA, 17 nt, Homo sapiens
uaucacuccgaugacac

SEQ ID NO: 6890 - RNA, 17 nt, Homo sapiens
ccgaugacacagacacc

SEQ ID NO: 6891 - RNA, 17 nt, Homo sapiens
gaugacacagacaccac

SEQ ID NO: 6892 - RNA, 17 nt, Homo sapiens
acacagacaccaccgug

SEQ ID NO: 6893 - RNA, 17 nt, Homo sapiens
acagacaccaccgugua

SEQ ID NO: 6894 - RNA, 17 nt, Homo sapiens
cagacaccaccguguac

SEQ ID NO: 6895 - RNA, 17 nt, Homo sapiens
gacaccaccguguacuc

SEQ ID NO: 6896 - RNA, 17 nt, Homo sapiens
ccguguacuccagugag

SEQ ID NO: 6897 - RNA, 17 nt, Homo sapiens
guguacuccagugagga

SEQ ID NO: 6898 - RNA, 17 nt, Homo sapiens
uguacuccagugaggaa

SEQ ID NO: 6899 - RNA, 17 nt, Homo sapiens
gaggaagcagaacuuuu

SEQ ID NO: 6900 - RNA, 17 nt, Homo sapiens
agcagaacuuuuaaagc

SEQ ID NO: 6901 - RNA, 17 nt, Homo sapiens
uuuaaagcugauagaga

SEQ ID NO: 6902 - RNA, 17 nt, Homo sapiens
uggagugcaaaccggua

SEQ ID NO: 6903 - RNA, 17 nt, Homo sapiens
gugcaaaccgguagcac

SEQ ID NO: 6904 - RNA, 17 nt, Homo sapiens
ccgguagcacagcccag

SEQ ID NO: 6905 - RNA, 17 nt, Homo sapiens
gguagcacagcccagau

SEQ ID NO: 6906 - RNA, 17 nt, Homo sapiens
agcacagcccagauucu

SEQ ID NO: 6907 - RNA, 17 nt, Homo sapiens
gcacagcccagauucuc

SEQ ID NO: 6908 - RNA, 17 nt, Homo sapiens
cacagcccagauucucc

SEQ ID NO: 6909 - RNA, 17 nt, Homo sapiens
ccagauucuccagccug

SEQ ID NO: 6910 - RNA, 17 nt, Homo sapiens
agauucuccagccugac

SEQ ID NO: 6911 - RNA, 17 nt, Homo sapiens
gauucuccagccugaca

SEQ ID NO: 6912 - RNA, 17 nt, Homo sapiens
ucuccagccugacacgg

SEQ ID NO: 6913 - RNA, 17 nt, Homo sapiens
cuccagccugacacggg

SEQ ID NO: 6914 - RNA, 17 nt, Homo sapiens
agccugacacggggacc

SEQ ID NO: 6915 - RNA, 17 nt, Homo sapiens
acggggaccacacugag

SEQ ID NO: 6916 - RNA, 17 nt, Homo sapiens
cggggaccacacugagc

SEQ ID NO: 6917 - RNA, 17 nt, Homo sapiens
gggaccacacugagcuc

SEQ ID NO: 6918 - RNA, 17 nt, Homo sapiens
gaccacacugagcucuc

SEQ ID NO: 6919 - RNA, 17 nt, Homo sapiens
cacugagcucuccuccu

SEQ ID NO: 6920 - RNA, 17 nt, Homo sapiens
cugagcucuccuccugu

SEQ ID NO: 6921 - RNA, 17 nt, Homo sapiens
gagcucuccuccuguuu

SEQ ID NO: 6922 - RNA, 17 nt, Homo sapiens
agcucuccuccuguuua

SEQ ID NO: 6923 - RNA, 17 nt, Homo sapiens
cucuccuccuguuuaaa

SEQ ID NO: 6924 - RNA, 17 nt, Homo sapiens
ucuccuccuguuuaaaa

SEQ ID NO: 6925 - RNA, 17 nt, Homo sapiens
aaggaagcauccacacc

SEQ ID NO: 6926 - RNA, 17 nt, Homo sapiens
gaagcauccacacccca

SEQ ID NO: 6927 - RNA, 17 nt, Homo sapiens
aagcauccacaccccaa

SEQ ID NO: 6928 - RNA, 17 nt, Homo sapiens
gcauccacaccccaacu

SEQ ID NO: 6929 - RNA, 17 nt, Homo sapiens
auccacaccccaacucc

SEQ ID NO: 6930 - RNA, 17 nt, Homo sapiens
uccacaccccaacuccc

SEQ ID NO: 6931 - RNA, 17 nt, Homo sapiens
ccacaccccaacucccg

SEQ ID NO: 6932 - RNA, 17 nt, Homo sapiens
cacaccccaacucccgg

SEQ ID NO: 6933 - RNA, 17 nt, Homo sapiens
accccaacucccggaca

SEQ ID NO: 6934 - RNA, 17 nt, Homo sapiens
cccaacucccggacauc

SEQ ID NO: 6935 - RNA, 17 nt, Homo sapiens
ccaacucccggacauca

SEQ ID NO: 6936 - RNA, 17 nt, Homo sapiens
ucccggacaucacauga

SEQ ID NO: 6937 - RNA, 17 nt, Homo sapiens
cggacaucacaugagag

SEQ ID NO: 6938 - RNA, 17 nt, Homo sapiens
gacaucacaugagaggu

SEQ ID NO: 6939 - RNA, 17 nt, Homo sapiens
gagaggucugcucagau

SEQ ID NO: 6940 - RNA, 17 nt, Homo sapiens
aggucugcucagauuuu

SEQ ID NO: 6941 - RNA, 17 nt, Homo sapiens
gucugcucagauuuuga

SEQ ID NO: 6942 - RNA, 17 nt, Homo sapiens
uguuguucuuuccacca

SEQ ID NO: 6943 - RNA, 17 nt, Homo sapiens
guucuuuccaccagcag

SEQ ID NO: 6944 - RNA, 17 nt, Homo sapiens
uucuuuccaccagcagg

SEQ ID NO: 6945 - RNA, 17 nt, Homo sapiens
cuuuccaccagcaggaa

SEQ ID NO: 6946 - RNA, 17 nt, Homo sapiens
uuuccaccagcaggaag

SEQ ID NO: 6947 - RNA, 17 nt, Homo sapiens
ccaccagcaggaaguag

SEQ ID NO: 6948 - RNA, 17 nt, Homo sapiens
gaaguagccgcauuuga

SEQ ID NO: 6949 - RNA, 17 nt, Homo sapiens
guagccgcauuugauuu

SEQ ID NO: 6950 - RNA, 17 nt, Homo sapiens
ugauuuucauuucgaca

SEQ ID NO: 6951 - RNA, 17 nt, Homo sapiens
auuucgacaacagaaaa

SEQ ID NO: 6952 - RNA, 17 nt, Homo sapiens
ucgacaacagaaaaagg

SEQ ID NO: 6953 - RNA, 17 nt, Homo sapiens
aaaaggaccucggacug

SEQ ID NO: 6954 - RNA, 17 nt, Homo sapiens
aaaggaccucggacugc

SEQ ID NO: 6955 - RNA, 17 nt, Homo sapiens
ccucggacugcagggag

SEQ ID NO: 6956 - RNA, 17 nt, Homo sapiens
cggacugcagggagcca

SEQ ID NO: 6957 - RNA, 17 nt, Homo sapiens
cagggagccagcucuuc

SEQ ID NO: 6958 - RNA, 17 nt, Homo sapiens
agggagccagcucuucu

SEQ ID NO: 6959 - RNA, 17 nt, Homo sapiens
gagccagcucuucuagg

SEQ ID NO: 6960 - RNA, 17 nt, Homo sapiens
gccagcucuucuaggcu

SEQ ID NO: 6961 - RNA, 17 nt, Homo sapiens
agcucuucuaggcuugu

SEQ ID NO: 6962 - RNA, 16 nt, Homo sapiens
gcaaggugcugcuggc

SEQ ID NO: 6963 - RNA, 16 nt, Homo sapiens
gcuggccgucgcccug

SEQ ID NO: 6964 - RNA, 16 nt, Homo sapiens
cuguggcucugcgugg

SEQ ID NO: 6965 - RNA, 16 nt, Homo sapiens
gacccgggccgccucu

SEQ ID NO: 6966 - RNA, 16 nt, Homo sapiens
cuguggguuugccuag

SEQ ID NO: 6967 - RNA, 16 nt, Homo sapiens
uguuucucuugaucug

SEQ ID NO: 6968 - RNA, 16 nt, Homo sapiens
cucuugaucugcccag

SEQ ID NO: 6969 - RNA, 16 nt, Homo sapiens
caaauuacuugcaggg

SEQ ID NO: 6970 - RNA, 16 nt, Homo sapiens
gaguggcagugagcaa

SEQ ID NO: 6971 - RNA, 16 nt, Homo sapiens
ggguggaggugacuga

SEQ ID NO: 6972 - RNA, 16 nt, Homo sapiens
ggaggugacugagugc

SEQ ID NO: 6973 - RNA, 16 nt, Homo sapiens
gugacugagugcagcg

SEQ ID NO: 6974 - RNA, 16 nt, Homo sapiens
ugagugcagcgauggc

SEQ ID NO: 6975 - RNA, 16 nt, Homo sapiens
uuccaaaagugaucgg

SEQ ID NO: 6976 - RNA, 16 nt, Homo sapiens
gaucggaaaugacacu

SEQ ID NO: 6977 - RNA, 16 nt, Homo sapiens
gccuacaagugcuucu

SEQ ID NO: 6978 - RNA, 16 nt, Homo sapiens
ccgggaaacugacuug

SEQ ID NO: 6979 - RNA, 16 nt, Homo sapiens
uccauuuauugcuucu

SEQ ID NO: 6980 - RNA, 16 nt, Homo sapiens
uucuguuagugaccaa

SEQ ID NO: 6981 - RNA, 16 nt, Homo sapiens
guacauuacugagaac

SEQ ID NO: 6982 - RNA, 16 nt, Homo sapiens
aaacuguggugauucc

SEQ ID NO: 6983 - RNA, 16 nt, Homo sapiens
gucacuuugugcaaga

SEQ ID NO: 6984 - RNA, 16 nt, Homo sapiens
auuuguuccugauggu

SEQ ID NO: 6985 - RNA, 16 nt, Homo sapiens
ccagcuacaugaucag

SEQ ID NO: 6986 - RNA, 16 nt, Homo sapiens
gaucagcuaugcuggc

SEQ ID NO: 6987 - RNA, 16 nt, Homo sapiens
ggucuucugugaagca

SEQ ID NO: 6988 - RNA, 16 nt, Homo sapiens
aaaaauuaaugaugaa

SEQ ID NO: 6989 - RNA, 16 nt, Homo sapiens
aauuaaugaugaaagu

SEQ ID NO: 6990 - RNA, 16 nt, Homo sapiens
uaggauuuaugaugug

SEQ ID NO: 6991 - RNA, 16 nt, Homo sapiens
augugguucugagucc

SEQ ID NO: 6992 - RNA, 16 nt, Homo sapiens
ucauggaauugaacua

SEQ ID NO: 6993 - RNA, 16 nt, Homo sapiens
agcaagaacugaacua

SEQ ID NO: 6994 - RNA, 16 nt, Homo sapiens
uguggggauugacuuc

SEQ ID NO: 6995 - RNA, 16 nt, Homo sapiens
acccuucuucgaagca

SEQ ID NO: 6996 - RNA, 16 nt, Homo sapiens
cuuguaaaccgagacc

SEQ ID NO: 6997 - RNA, 16 nt, Homo sapiens
gucugggagugagaug

SEQ ID NO: 6998 - RNA, 16 nt, Homo sapiens
ggagugagaugaagaa

SEQ ID NO: 6999 - RNA, 16 nt, Homo sapiens
agaaauuuuugagcac

SEQ ID NO: 7000 - RNA, 16 nt, Homo sapiens
aacccggagugaccaa

SEQ ID NO: 7001 - RNA, 16 nt, Homo sapiens
guacaccugugcagca

SEQ ID NO: 7002 - RNA, 16 nt, Homo sapiens
ccagugggcugaugac

SEQ ID NO: 7003 - RNA, 16 nt, Homo sapiens
gugggcugaugaccaa

SEQ ID NO: 7004 - RNA, 16 nt, Homo sapiens
caggguccaugaaaaa

SEQ ID NO: 7005 - RNA, 16 nt, Homo sapiens
accuuuuguugcuuuu

SEQ ID NO: 7006 - RNA, 16 nt, Homo sapiens
cagaaucccugcgaag

SEQ ID NO: 7007 - RNA, 16 nt, Homo sapiens
gaaucccugcgaagua

SEQ ID NO: 7008 - RNA, 16 nt, Homo sapiens
aauaccccuugagucc

SEQ ID NO: 7009 - RNA, 16 nt, Homo sapiens
ggcauguacugacgau

SEQ ID NO: 7010 - RNA, 16 nt, Homo sapiens
auguacugacgauuau

SEQ ID NO: 7011 - RNA, 16 nt, Homo sapiens
uuauggaagugaguga

SEQ ID NO: 7012 - RNA, 16 nt, Homo sapiens
ggaagugagugaaaga

SEQ ID NO: 7013 - RNA, 16 nt, Homo sapiens
ccagauuggugagaaa

SEQ ID NO: 7014 - RNA, 16 nt, Homo sapiens
ccacucaaacgcugac

SEQ ID NO: 7015 - RNA, 16 nt, Homo sapiens
cucaaacgcugacaug

SEQ ID NO: 7016 - RNA, 16 nt, Homo sapiens
uacggucuaugccauu

SEQ ID NO: 7017 - RNA, 16 nt, Homo sapiens
uuccucccccgcauca

SEQ ID NO: 7018 - RNA, 16 nt, Homo sapiens
gaggaagagugcgcca

SEQ ID NO: 7019 - RNA, 16 nt, Homo sapiens
ggaagagugcgccaac

SEQ ID NO: 7020 - RNA, 16 nt, Homo sapiens
gugcgccaacgagccc

SEQ ID NO: 7021 - RNA, 16 nt, Homo sapiens
cugucucagugacaaa

SEQ ID NO: 7022 - RNA, 16 nt, Homo sapiens
auacccuugugaagaa

SEQ ID NO: 7023 - RNA, 16 nt, Homo sapiens
aaauaaaauugaaguu

SEQ ID NO: 7024 - RNA, 16 nt, Homo sapiens
aaaucaauuugcucua

SEQ ID NO: 7025 - RNA, 16 nt, Homo sapiens
ugcucuaauugaagga

SEQ ID NO: 7026 - RNA, 16 nt, Homo sapiens
guacaaaugugaagcg

SEQ ID NO: 7027 - RNA, 16 nt, Homo sapiens
gagagagggugaucuc

SEQ ID NO: 7028 - RNA, 16 nt, Homo sapiens
ccuuccacgugaccag

SEQ ID NO: 7029 - RNA, 16 nt, Homo sapiens
cagggguccugaaauu

SEQ ID NO: 7030 - RNA, 16 nt, Homo sapiens
aaauuacuuugcaacc

SEQ ID NO: 7031 - RNA, 16 nt, Homo sapiens
uuugcaaccugacaug

SEQ ID NO: 7032 - RNA, 16 nt, Homo sapiens
aaccugacaugcagcc

SEQ ID NO: 7033 - RNA, 16 nt, Homo sapiens
gcagcccacugagcag

SEQ ID NO: 7034 - RNA, 16 nt, Homo sapiens
ucuuuguggugcacug

SEQ ID NO: 7035 - RNA, 16 nt, Homo sapiens
guggugcacugcagac

SEQ ID NO: 7036 - RNA, 16 nt, Homo sapiens
aucuacguuugagaac

SEQ ID NO: 7037 - RNA, 16 nt, Homo sapiens
cacagccucugccaau

SEQ ID NO: 7038 - RNA, 16 nt, Homo sapiens
ugggagaguugcccac

SEQ ID NO: 7039 - RNA, 16 nt, Homo sapiens
acaccuguuugcaaga

SEQ ID NO: 7040 - RNA, 16 nt, Homo sapiens
uuuggaaauugaaugc

SEQ ID NO: 7041 - RNA, 16 nt, Homo sapiens
gaaauugaaugccacc

SEQ ID NO: 7042 - RNA, 16 nt, Homo sapiens
uagcacaaaugacauu

SEQ ID NO: 7043 - RNA, 16 nt, Homo sapiens
augacauuuugaucau

SEQ ID NO: 7044 - RNA, 16 nt, Homo sapiens
gcuuaagaaugcaucc

SEQ ID NO: 7045 - RNA, 16 nt, Homo sapiens
augcauccuugcagga

SEQ ID NO: 7046 - RNA, 16 nt, Homo sapiens
gacuaugucugccuug

SEQ ID NO: 7047 - RNA, 16 nt, Homo sapiens
ugucugccuugcucaa

SEQ ID NO: 7048 - RNA, 16 nt, Homo sapiens
aaaagacauugcgugg

SEQ ID NO: 7049 - RNA, 16 nt, Homo sapiens
uggcacccacgaucac

SEQ ID NO: 7050 - RNA, 16 nt, Homo sapiens
agaaucagacgacaag

SEQ ID NO: 7051 - RNA, 16 nt, Homo sapiens
ggaaagcaucgaaguc

SEQ ID NO: 7052 - RNA, 16 nt, Homo sapiens
gaagucucaugcacgg

SEQ ID NO: 7053 - RNA, 16 nt, Homo sapiens
uaaagauaaugagacc

SEQ ID NO: 7054 - RNA, 16 nt, Homo sapiens
gcauuguauugaagga

SEQ ID NO: 7055 - RNA, 16 nt, Homo sapiens
cucacuauccgcagag

SEQ ID NO: 7056 - RNA, 16 nt, Homo sapiens
uccgcagagugaggaa

SEQ ID NO: 7057 - RNA, 16 nt, Homo sapiens
gaaggaggacgaaggc

SEQ ID NO: 7058 - RNA, 16 nt, Homo sapiens
cucuacaccugccagg

SEQ ID NO: 7059 - RNA, 16 nt, Homo sapiens
ugccaggcaugcagug

SEQ ID NO: 7060 - RNA, 16 nt, Homo sapiens
ucuuggcugugcaaaa

SEQ ID NO: 7061 - RNA, 16 nt, Homo sapiens
aauagaaggugcccag

SEQ ID NO: 7062 - RNA, 16 nt, Homo sapiens
aggaaaagacgaacuu

SEQ ID NO: 7063 - RNA, 16 nt, Homo sapiens
uaguaggcacgacggu

SEQ ID NO: 7064 - RNA, 16 nt, Homo sapiens
gcacgacggugauugc

SEQ ID NO: 7065 - RNA, 16 nt, Homo sapiens
gacggugauugccaug

SEQ ID NO: 7066 - RNA, 16 nt, Homo sapiens
gaggggaacugaagac

SEQ ID NO: 7067 - RNA, 16 nt, Homo sapiens
ggauccagaugaacuc

SEQ ID NO: 7068 - RNA, 16 nt, Homo sapiens
cccauuggaugaacau

SEQ ID NO: 7069 - RNA, 16 nt, Homo sapiens
ugaacauugugaacga

SEQ ID NO: 7070 - RNA, 16 nt, Homo sapiens
cauugugaacgacugc

SEQ ID NO: 7071 - RNA, 16 nt, Homo sapiens
gugaacgacugccuua

SEQ ID NO: 7072 - RNA, 16 nt, Homo sapiens
acugccuuaugaugcc

SEQ ID NO: 7073 - RNA, 16 nt, Homo sapiens
gccuuaugaugccagc

SEQ ID NO: 7074 - RNA, 16 nt, Homo sapiens
gagaccggcugaaccu

SEQ ID NO: 7075 - RNA, 16 nt, Homo sapiens
uggccguggugccuuu

SEQ ID NO: 7076 - RNA, 16 nt, Homo sapiens
ccaagagauugaagca

SEQ ID NO: 7077 - RNA, 16 nt, Homo sapiens
ugaagcagaugccuuu

SEQ ID NO: 7078 - RNA, 16 nt, Homo sapiens
cuuuggaauugacaag

SEQ ID NO: 7079 - RNA, 16 nt, Homo sapiens
acagcaacuugcagga

SEQ ID NO: 7080 - RNA, 16 nt, Homo sapiens
ucaaaauguugaaaga

SEQ ID NO: 7081 - RNA, 16 nt, Homo sapiens
aacacacagugagcau

SEQ ID NO: 7082 - RNA, 16 nt, Homo sapiens
agugagcaucgagcuc

SEQ ID NO: 7083 - RNA, 16 nt, Homo sapiens
ucucaugucugaacuc

SEQ ID NO: 7084 - RNA, 16 nt, Homo sapiens
ccuucuaggugccugu

SEQ ID NO: 7085 - RNA, 16 nt, Homo sapiens
cacucauggugauugu

SEQ ID NO: 7086 - RNA, 16 nt, Homo sapiens
guggaauucugcaaau

SEQ ID NO: 7087 - RNA, 16 nt, Homo sapiens
ccacuuaccugaggag

SEQ ID NO: 7088 - RNA, 16 nt, Homo sapiens
caagagaaaugaauuu

SEQ ID NO: 7089 - RNA, 16 nt, Homo sapiens
aaaggggcacgauucc

SEQ ID NO: 7090 - RNA, 16 nt, Homo sapiens
cuguggaucugaaacg

SEQ ID NO: 7091 - RNA, 16 nt, Homo sapiens
cugaaacggcgcuugg

SEQ ID NO: 7092 - RNA, 16 nt, Homo sapiens
gucccucagugaugua

SEQ ID NO: 7093 - RNA, 16 nt, Homo sapiens
ggaagcuccugaagau

SEQ ID NO: 7094 - RNA, 16 nt, Homo sapiens
aggacuuccugaccuu

SEQ ID NO: 7095 - RNA, 16 nt, Homo sapiens
ucuuggcaucgcgaaa

SEQ ID NO: 7096 - RNA, 16 nt, Homo sapiens
uuggcaucgcgaaagu

SEQ ID NO: 7097 - RNA, 16 nt, Homo sapiens
cuggcggcacgaaaua

SEQ ID NO: 7098 - RNA, 16 nt, Homo sapiens
uaaaaucugugacuuu

SEQ ID NO: 7099 - RNA, 16 nt, Homo sapiens
aaaaggagaugcucgc

SEQ ID NO: 7100 - RNA, 16 nt, Homo sapiens
ggagaugcucgccucc

SEQ ID NO: 7101 - RNA, 16 nt, Homo sapiens
gccucccuuugaaaug

SEQ ID NO: 7102 - RNA, 16 nt, Homo sapiens
aacaauuuuugacaga

SEQ ID NO: 7103 - RNA, 16 nt, Homo sapiens
aauccagagugacguc

SEQ ID NO: 7104 - RNA, 16 nt, Homo sapiens
uugguguuuugcugug

SEQ ID NO: 7105 - RNA, 16 nt, Homo sapiens
uuccuuaggugcuucu

SEQ ID NO: 7106 - RNA, 16 nt, Homo sapiens
gguaaagauugaugaa

SEQ ID NO: 7107 - RNA, 16 nt, Homo sapiens
aaagauugaugaagaa

SEQ ID NO: 7108 - RNA, 16 nt, Homo sapiens
uuuuguaggcgauuga

SEQ ID NO: 7109 - RNA, 16 nt, Homo sapiens
guaggcgauugaaaga

SEQ ID NO: 7110 - RNA, 16 nt, Homo sapiens
gaacuagaaugagggc

SEQ ID NO: 7111 - RNA, 16 nt, Homo sapiens
gagggccccugauuau

SEQ ID NO: 7112 - RNA, 16 nt, Homo sapiens
accagaccaugcugga

SEQ ID NO: 7113 - RNA, 16 nt, Homo sapiens
gaaaucucuugcaagc

SEQ ID NO: 7114 - RNA, 16 nt, Homo sapiens
gcaagcuaaugcucag

SEQ ID NO: 7115 - RNA, 16 nt, Homo sapiens
uuguucuuccgauauc

SEQ ID NO: 7116 - RNA, 16 nt, Homo sapiens
cagagacuuugagcau

SEQ ID NO: 7117 - RNA, 16 nt, Homo sapiens
gacucucucugccuac

SEQ ID NO: 7118 - RNA, 16 nt, Homo sapiens
ggaaguaugugacccc

SEQ ID NO: 7119 - RNA, 16 nt, Homo sapiens
auuccauuaugacaac

SEQ ID NO: 7120 - RNA, 16 nt, Homo sapiens
gucaguaucugcagaa

SEQ ID NO: 7121 - RNA, 16 nt, Homo sapiens
aacaguaagcgaaaga

SEQ ID NO: 7122 - RNA, 16 nt, Homo sapiens
gccggccugugagugu

SEQ ID NO: 7123 - RNA, 16 nt, Homo sapiens
aaaaacauuugaagau

SEQ ID NO: 7124 - RNA, 16 nt, Homo sapiens
aaucccagaugacaac

SEQ ID NO: 7125 - RNA, 16 nt, Homo sapiens
uaugguucuugccuca

SEQ ID NO: 7126 - RNA, 16 nt, Homo sapiens
cagaagagcugaaaac

SEQ ID NO: 7127 - RNA, 16 nt, Homo sapiens
guggaauggugcccag

SEQ ID NO: 7128 - RNA, 16 nt, Homo sapiens
uguggcaucugaaggc

SEQ ID NO: 7129 - RNA, 16 nt, Homo sapiens
auaucacuccgaugac

SEQ ID NO: 7130 - RNA, 16 nt, Homo sapiens
ucacuccgaugacaca

SEQ ID NO: 7131 - RNA, 16 nt, Homo sapiens
guacuccagugaggaa

SEQ ID NO: 7132 - RNA, 16 nt, Homo sapiens
uuuuaaagcugauaga

SEQ ID NO: 7133 - RNA, 16 nt, Homo sapiens
agauuggagugcaaac

SEQ ID NO: 7134 - RNA, 16 nt, Homo sapiens
ucuccagccugacacg

SEQ ID NO: 7135 - RNA, 16 nt, Homo sapiens
ggaccacacugagcuc

SEQ ID NO: 7136 - RNA, 16 nt, Homo sapiens
gacaucacaugagagg

SEQ ID NO: 7137 - RNA, 16 nt, Homo sapiens
ugagaggucugcucag

SEQ ID NO: 7138 - RNA, 16 nt, Homo sapiens
cucagauuuugaagug

SEQ ID NO: 7139 - RNA, 16 nt, Homo sapiens
ggaaguagccgcauuu

SEQ ID NO: 7140 - RNA, 16 nt, Homo sapiens
agccgcauuugauuuu

SEQ ID NO: 7141 - RNA, 16 nt, Homo sapiens
uuuucauuucgacaac

SEQ ID NO: 7142 - RNA, 16 nt, Homo sapiens
accucggacugcaggg

SEQ ID NO: 7143 - RNA, 17 nt, Homo sapiens
uccucucggcuccuccc

SEQ ID NO: 7144 - RNA, 17 nt, Homo sapiens
ccuccccggcagcggcg

SEQ ID NO: 7145 - RNA, 17 nt, Homo sapiens
ccccggcagcggcggcg

SEQ ID NO: 7146 - RNA, 17 nt, Homo sapiens
cggcagcggcggcggcu

SEQ ID NO: 7147 - RNA, 17 nt, Homo sapiens
cagcggcggcggcucgg

SEQ ID NO: 7148 - RNA, 17 nt, Homo sapiens
cggcggcggcucggagc

SEQ ID NO: 7149 - RNA, 17 nt, Homo sapiens
ggcucggagcgggcucc

SEQ ID NO: 7150 - RNA, 17 nt, Homo sapiens
cggagcgggcuccgggg

SEQ ID NO: 7151 - RNA, 17 nt, Homo sapiens
gcuccggggcucgggug

SEQ ID NO: 7152 - RNA, 17 nt, Homo sapiens
gggcucgggugcagcgg

SEQ ID NO: 7153 - RNA, 17 nt, Homo sapiens
gcucgggugcagcggcc

SEQ ID NO: 7154 - RNA, 17 nt, Homo sapiens
cgggugcagcggccagc

SEQ ID NO: 7155 - RNA, 17 nt, Homo sapiens
gugcagcggccagcggg

SEQ ID NO: 7156 - RNA, 17 nt, Homo sapiens
agcggccagcgggccug

SEQ ID NO: 7157 - RNA, 17 nt, Homo sapiens
gccagcgggccuggcgg

SEQ ID NO: 7158 - RNA, 17 nt, Homo sapiens
cgggccuggcggcgagg

SEQ ID NO: 7159 - RNA, 17 nt, Homo sapiens
gccuggcggcgaggauu

SEQ ID NO: 7160 - RNA, 17 nt, Homo sapiens
cggcgaggauuacccgg

SEQ ID NO: 7161 - RNA, 17 nt, Homo sapiens
ccggggaagugguuguc

SEQ ID NO: 7162 - RNA, 17 nt, Homo sapiens
gggaagugguugucucc

SEQ ID NO: 7163 - RNA, 17 nt, Homo sapiens
aagugguugucuccugg

SEQ ID NO: 7164 - RNA, 17 nt, Homo sapiens
gucuccuggcuggagcc

SEQ ID NO: 7165 - RNA, 17 nt, Homo sapiens
uggcuggagccgcgaga

SEQ ID NO: 7166 - RNA, 17 nt, Homo sapiens
cuggagccgcgagacgg

SEQ ID NO: 7167 - RNA, 17 nt, Homo sapiens
gccgcgagacgggcgcu

SEQ ID NO: 7168 - RNA, 17 nt, Homo sapiens
cgagacgggcgcucagg

SEQ ID NO: 7169 - RNA, 17 nt, Homo sapiens
agacgggcgcucagggc

SEQ ID NO: 7170 - RNA, 17 nt, Homo sapiens
cgcucagggcgcggggc

SEQ ID NO: 7171 - RNA, 17 nt, Homo sapiens
cucagggcgcggggccg

SEQ ID NO: 7172 - RNA, 17 nt, Homo sapiens
ggcgcggggccggcggc

SEQ ID NO: 7173 - RNA, 17 nt, Homo sapiens
cggggccggcggcggcg

SEQ ID NO: 7174 - RNA, 17 nt, Homo sapiens
ggccggcggcggcgaac

SEQ ID NO: 7175 - RNA, 17 nt, Homo sapiens
cggcggcggcgaacgag

SEQ ID NO: 7176 - RNA, 17 nt, Homo sapiens
ggcggcgaacgagagga

SEQ ID NO: 7177 - RNA, 17 nt, Homo sapiens
acgagaggacggacucu

SEQ ID NO: 7178 - RNA, 17 nt, Homo sapiens
gaggacggacucuggcg

SEQ ID NO: 7179 - RNA, 17 nt, Homo sapiens
ggacucuggcggccggg

SEQ ID NO: 7180 - RNA, 17 nt, Homo sapiens
cucuggcggccgggucg

SEQ ID NO: 7181 - RNA, 17 nt, Homo sapiens
gcggccgggucguuggc

SEQ ID NO: 7182 - RNA, 17 nt, Homo sapiens
gccgggucguuggccgg

SEQ ID NO: 7183 - RNA, 17 nt, Homo sapiens
ggucguuggccggggga

SEQ ID NO: 7184 - RNA, 17 nt, Homo sapiens
ccgggggagcgcgggca

SEQ ID NO: 7185 - RNA, 17 nt, Homo sapiens
gggggagcgcgggcacc

SEQ ID NO: 7186 - RNA, 17 nt, Homo sapiens
gagcgcgggcaccgggc

SEQ ID NO: 7187 - RNA, 17 nt, Homo sapiens
ggcaccgggcgagcagg

SEQ ID NO: 7188 - RNA, 17 nt, Homo sapiens
ccgggcgagcaggccgc

SEQ ID NO: 7189 - RNA, 17 nt, Homo sapiens
gcgagcaggccgcgucg

SEQ ID NO: 7190 - RNA, 17 nt, Homo sapiens
agcaggccgcgucgcgc

SEQ ID NO: 7191 - RNA, 17 nt, Homo sapiens
caggccgcgucgcgcuc

SEQ ID NO: 7192 - RNA, 17 nt, Homo sapiens
gccgcgucgcgcucacc

SEQ ID NO: 7193 - RNA, 17 nt, Homo sapiens
cgcgucgcgcucaccau

SEQ ID NO: 7194 - RNA, 17 nt, Homo sapiens
ucaccauggucagcuac

SEQ ID NO: 7195 - RNA, 17 nt, Homo sapiens
cauggucagcuacuggg

SEQ ID NO: 7196 - RNA, 17 nt, Homo sapiens
cuacugggacaccgggg

SEQ ID NO: 7197 - RNA, 17 nt, Homo sapiens
acaccgggguccugcug

SEQ ID NO: 7198 - RNA, 17 nt, Homo sapiens
gggguccugcugugcgc

SEQ ID NO: 7199 - RNA, 17 nt, Homo sapiens
guccugcugugcgcgcu

SEQ ID NO: 7200 - RNA, 17 nt, Homo sapiens
ccugcugugcgcgcugc

SEQ ID NO: 7201 - RNA, 17 nt, Homo sapiens
ugcugugcgcgcugcuc

SEQ ID NO: 7202 - RNA, 17 nt, Homo sapiens
cugugcgcgcugcucag

SEQ ID NO: 7203 - RNA, 17 nt, Homo sapiens
ugcgcgcugcucagcug

SEQ ID NO: 7204 - RNA, 17 nt, Homo sapiens
gcugcucagcugucugc

SEQ ID NO: 7205 - RNA, 17 nt, Homo sapiens
gcucagcugucugcuuc

SEQ ID NO: 7206 - RNA, 17 nt, Homo sapiens
agcugucugcuucucac

SEQ ID NO: 7207 - RNA, 17 nt, Homo sapiens
cucacaggaucuaguuc

SEQ ID NO: 7208 - RNA, 17 nt, Homo sapiens
aggaucuaguucagguu

SEQ ID NO: 7209 - RNA, 17 nt, Homo sapiens
uaguucagguucaaaau

SEQ ID NO: 7210 - RNA, 17 nt, Homo sapiens
gguucaaaauuaaaaga

SEQ ID NO: 7211 - RNA, 17 nt, Homo sapiens
auuaaaagauccugaac

SEQ ID NO: 7212 - RNA, 17 nt, Homo sapiens
gauccugaacugaguuu

SEQ ID NO: 7213 - RNA, 17 nt, Homo sapiens
ugaacugaguuuaaaag

SEQ ID NO: 7214 - RNA, 17 nt, Homo sapiens
uuuaaaaggcacccagc

SEQ ID NO: 7215 - RNA, 17 nt, Homo sapiens
ggcacccagcacaucau

SEQ ID NO: 7216 - RNA, 17 nt, Homo sapiens
cacaucaugcaagcagg

SEQ ID NO: 7217 - RNA, 17 nt, Homo sapiens
ucaugcaagcaggccag

SEQ ID NO: 7218 - RNA, 17 nt, Homo sapiens
gcaagcaggccagacac

SEQ ID NO: 7219 - RNA, 17 nt, Homo sapiens
caggccagacacugcau

SEQ ID NO: 7220 - RNA, 17 nt, Homo sapiens
cagacacugcaucucca

SEQ ID NO: 7221 - RNA, 17 nt, Homo sapiens
caucuccaaugcagggg

SEQ ID NO: 7222 - RNA, 17 nt, Homo sapiens
ucuccaaugcagggggg

SEQ ID NO: 7223 - RNA, 17 nt, Homo sapiens
ggggggaagcagcccau

SEQ ID NO: 7224 - RNA, 17 nt, Homo sapiens
gggaagcagcccauaaa

SEQ ID NO: 7225 - RNA, 17 nt, Homo sapiens
gcccauaaauggucuuu

SEQ ID NO: 7226 - RNA, 17 nt, Homo sapiens
cauaaauggucuuugcc

SEQ ID NO: 7227 - RNA, 17 nt, Homo sapiens
uggucuuugccugaaau

SEQ ID NO: 7228 - RNA, 17 nt, Homo sapiens
ugccugaaauggugagu

SEQ ID NO: 7229 - RNA, 17 nt, Homo sapiens
cugaaauggugaguaag

SEQ ID NO: 7230 - RNA, 17 nt, Homo sapiens
aauggugaguaaggaaa

SEQ ID NO: 7231 - RNA, 17 nt, Homo sapiens
uaaggaaagcgaaaggc

SEQ ID NO: 7232 - RNA, 17 nt, Homo sapiens
agcgaaaggcugagcau

SEQ ID NO: 7233 - RNA, 17 nt, Homo sapiens
aaggcugagcauaacua

SEQ ID NO: 7234 - RNA, 17 nt, Homo sapiens
ugagcauaacuaaaucu

SEQ ID NO: 7235 - RNA, 17 nt, Homo sapiens
auaacuaaaucugccug

SEQ ID NO: 7236 - RNA, 17 nt, Homo sapiens
cuaaaucugccugugga

SEQ ID NO: 7237 - RNA, 17 nt, Homo sapiens
aucugccuguggaagaa

SEQ ID NO: 7238 - RNA, 17 nt, Homo sapiens
uggaagaaauggcaaac

SEQ ID NO: 7239 - RNA, 17 nt, Homo sapiens
aagaaauggcaaacaau

SEQ ID NO: 7240 - RNA, 17 nt, Homo sapiens
aauggcaaacaauucug

SEQ ID NO: 7241 - RNA, 17 nt, Homo sapiens
ggcaaacaauucugcag

SEQ ID NO: 7242 - RNA, 17 nt, Homo sapiens
acaauucugcaguacuu

SEQ ID NO: 7243 - RNA, 17 nt, Homo sapiens
auucugcaguacuuuaa

SEQ ID NO: 7244 - RNA, 17 nt, Homo sapiens
guacuuuaaccuugaac

SEQ ID NO: 7245 - RNA, 17 nt, Homo sapiens
aaccuugaacacagcuc

SEQ ID NO: 7246 - RNA, 17 nt, Homo sapiens
ugaacacagcucaagca

SEQ ID NO: 7247 - RNA, 17 nt, Homo sapiens
cagcucaagcaaaccac

SEQ ID NO: 7248 - RNA, 17 nt, Homo sapiens
ucaagcaaaccacacug

SEQ ID NO: 7249 - RNA, 17 nt, Homo sapiens
ccacacuggcuucuaca

SEQ ID NO: 7250 - RNA, 17 nt, Homo sapiens
cuucuacagcugcaaau

SEQ ID NO: 7251 - RNA, 17 nt, Homo sapiens
cuacagcugcaaauauc

SEQ ID NO: 7252 - RNA, 17 nt, Homo sapiens
agcugcaaauaucuagc

SEQ ID NO: 7253 - RNA, 17 nt, Homo sapiens
aauaucuagcuguaccu

SEQ ID NO: 7254 - RNA, 17 nt, Homo sapiens
aucuagcuguaccuacu

SEQ ID NO: 7255 - RNA, 17 nt, Homo sapiens
agaaggaaacagaaucu

SEQ ID NO: 7256 - RNA, 17 nt, Homo sapiens
gaaacagaaucugcaau

SEQ ID NO: 7257 - RNA, 17 nt, Homo sapiens
cagaaucugcaaucuau

SEQ ID NO: 7258 - RNA, 17 nt, Homo sapiens
aaucugcaaucuauaua

SEQ ID NO: 7259 - RNA, 17 nt, Homo sapiens
auuuauuagugauacag

SEQ ID NO: 7260 - RNA, 17 nt, Homo sapiens
uauuagugauacaggua

SEQ ID NO: 7261 - RNA, 17 nt, Homo sapiens
ugauacagguagaccuu

SEQ ID NO: 7262 - RNA, 17 nt, Homo sapiens
acagguagaccuuucgu

SEQ ID NO: 7263 - RNA, 17 nt, Homo sapiens
gaccuuucguagagaug

SEQ ID NO: 7264 - RNA, 17 nt, Homo sapiens
ucguagagauguacagu

SEQ ID NO: 7265 - RNA, 17 nt, Homo sapiens
guagagauguacaguga

SEQ ID NO: 7266 - RNA, 17 nt, Homo sapiens
gauguacagugaaaucc

SEQ ID NO: 7267 - RNA, 17 nt, Homo sapiens
acagugaaauccccgaa

SEQ ID NO: 7268 - RNA, 17 nt, Homo sapiens
uccccgaaauuauacac

SEQ ID NO: 7269 - RNA, 17 nt, Homo sapiens
uacacaugacugaagga

SEQ ID NO: 7270 - RNA, 17 nt, Homo sapiens
ggaagggagcucgucau

SEQ ID NO: 7271 - RNA, 17 nt, Homo sapiens
gggagcucgucauuccc

SEQ ID NO: 7272 - RNA, 17 nt, Homo sapiens
cauucccugccggguua

SEQ ID NO: 7273 - RNA, 17 nt, Homo sapiens
ccugccggguuacguca

SEQ ID NO: 7274 - RNA, 17 nt, Homo sapiens
cggguuacgucaccuaa

SEQ ID NO: 7275 - RNA, 17 nt, Homo sapiens
gucaccuaacaucacug

SEQ ID NO: 7276 - RNA, 17 nt, Homo sapiens
acaucacuguuacuuua

SEQ ID NO: 7277 - RNA, 17 nt, Homo sapiens
uuaaaaaaguuuccacu

SEQ ID NO: 7278 - RNA, 17 nt, Homo sapiens
uccacuugacacuuuga

SEQ ID NO: 7279 - RNA, 17 nt, Homo sapiens
acacuuugaucccugau

SEQ ID NO: 7280 - RNA, 17 nt, Homo sapiens
gaucccugauggaaaac

SEQ ID NO: 7281 - RNA, 17 nt, Homo sapiens
gauggaaaacgcauaau

SEQ ID NO: 7282 - RNA, 17 nt, Homo sapiens
uggaaaacgcauaaucu

SEQ ID NO: 7283 - RNA, 17 nt, Homo sapiens
aacgcauaaucugggac

SEQ ID NO: 7284 - RNA, 17 nt, Homo sapiens
aaucugggacaguagaa

SEQ ID NO: 7285 - RNA, 17 nt, Homo sapiens
cugggacaguagaaagg

SEQ ID NO: 7286 - RNA, 17 nt, Homo sapiens
uagaaagggcuucauca

SEQ ID NO: 7287 - RNA, 17 nt, Homo sapiens
cauaucaaaugcaacgu

SEQ ID NO: 7288 - RNA, 17 nt, Homo sapiens
uaucaaaugcaacguac

SEQ ID NO: 7289 - RNA, 17 nt, Homo sapiens
caaaugcaacguacaaa

SEQ ID NO: 7290 - RNA, 17 nt, Homo sapiens
aaugcaacguacaaaga

SEQ ID NO: 7291 - RNA, 17 nt, Homo sapiens
acaaagaaauagggcuu

SEQ ID NO: 7292 - RNA, 17 nt, Homo sapiens
gaaauagggcuucugac

SEQ ID NO: 7293 - RNA, 17 nt, Homo sapiens
ggcuucugaccugugaa

SEQ ID NO: 7294 - RNA, 17 nt, Homo sapiens
ucugaccugugaagcaa

SEQ ID NO: 7295 - RNA, 17 nt, Homo sapiens
ccugugaagcaacaguc

SEQ ID NO: 7296 - RNA, 17 nt, Homo sapiens
gugaagcaacagucaau

SEQ ID NO: 7297 - RNA, 17 nt, Homo sapiens
aagcaacagucaauggg

SEQ ID NO: 7298 - RNA, 17 nt, Homo sapiens
aacagucaaugggcauu

SEQ ID NO: 7299 - RNA, 17 nt, Homo sapiens
gucaaugggcauuugua

SEQ ID NO: 7300 - RNA, 17 nt, Homo sapiens
gggcauuuguauaagac

SEQ ID NO: 7301 - RNA, 17 nt, Homo sapiens
uguauaagacaaacuau

SEQ ID NO: 7302 - RNA, 17 nt, Homo sapiens
uaagacaaacuaucuca

SEQ ID NO: 7303 - RNA, 17 nt, Homo sapiens
acacaucgacaaaccaa

SEQ ID NO: 7304 - RNA, 17 nt, Homo sapiens
aucgacaaaccaauaca

SEQ ID NO: 7305 - RNA, 17 nt, Homo sapiens
acaaaccaauacaauca

SEQ ID NO: 7306 - RNA, 17 nt, Homo sapiens
ccaauacaaucauagau

SEQ ID NO: 7307 - RNA, 17 nt, Homo sapiens
aaucauagauguccaaa

SEQ ID NO: 7308 - RNA, 17 nt, Homo sapiens
ucauagauguccaaaua

SEQ ID NO: 7309 - RNA, 17 nt, Homo sapiens
auguccaaauaagcaca

SEQ ID NO: 7310 - RNA, 17 nt, Homo sapiens
ccaaauaagcacaccac

SEQ ID NO: 7311 - RNA, 17 nt, Homo sapiens
cacaccacgcccaguca

SEQ ID NO: 7312 - RNA, 17 nt, Homo sapiens
cacgcccagucaaauua

SEQ ID NO: 7313 - RNA, 17 nt, Homo sapiens
ccagucaaauuacuuag

SEQ ID NO: 7314 - RNA, 17 nt, Homo sapiens
acuuagaggccauacuc

SEQ ID NO: 7315 - RNA, 17 nt, Homo sapiens
auacucuuguccucaau

SEQ ID NO: 7316 - RNA, 17 nt, Homo sapiens
uguccucaauuguacug

SEQ ID NO: 7317 - RNA, 17 nt, Homo sapiens
ccucaauuguacugcua

SEQ ID NO: 7318 - RNA, 17 nt, Homo sapiens
auuguacugcuaccacu

SEQ ID NO: 7319 - RNA, 17 nt, Homo sapiens
ucccuugaacacgagag

SEQ ID NO: 7320 - RNA, 17 nt, Homo sapiens
acacgagaguucaaaug

SEQ ID NO: 7321 - RNA, 17 nt, Homo sapiens
gaguucaaaugaccugg

SEQ ID NO: 7322 - RNA, 17 nt, Homo sapiens
uucaaaugaccuggagu

SEQ ID NO: 7323 - RNA, 17 nt, Homo sapiens
gaccuggaguuacccug

SEQ ID NO: 7324 - RNA, 17 nt, Homo sapiens
uuacccugaugaaaaaa

SEQ ID NO: 7325 - RNA, 17 nt, Homo sapiens
ugaaaaaaauaagagag

SEQ ID NO: 7326 - RNA, 17 nt, Homo sapiens
auaagagagcuuccgua

SEQ ID NO: 7327 - RNA, 17 nt, Homo sapiens
gagcuuccguaaggcga

SEQ ID NO: 7328 - RNA, 17 nt, Homo sapiens
uccguaaggcgacgaau

SEQ ID NO: 7329 - RNA, 17 nt, Homo sapiens
guaaggcgacgaauuga

SEQ ID NO: 7330 - RNA, 17 nt, Homo sapiens
ggcgacgaauugaccaa

SEQ ID NO: 7331 - RNA, 17 nt, Homo sapiens
acgaauugaccaaagca

SEQ ID NO: 7332 - RNA, 17 nt, Homo sapiens
ugaccaaagcaauuccc

SEQ ID NO: 7333 - RNA, 17 nt, Homo sapiens
ccaaagcaauucccaug

SEQ ID NO: 7334 - RNA, 17 nt, Homo sapiens
auucccaugccaacaua

SEQ ID NO: 7335 - RNA, 17 nt, Homo sapiens
ccaugccaacauauucu

SEQ ID NO: 7336 - RNA, 17 nt, Homo sapiens
auucuacaguguucuua

SEQ ID NO: 7337 - RNA, 17 nt, Homo sapiens
ucuacaguguucuuacu

SEQ ID NO: 7338 - RNA, 17 nt, Homo sapiens
uacuauugacaaaaugc

SEQ ID NO: 7339 - RNA, 17 nt, Homo sapiens
uugacaaaaugcagaac

SEQ ID NO: 7340 - RNA, 17 nt, Homo sapiens
gacaaaaugcagaacaa

SEQ ID NO: 7341 - RNA, 17 nt, Homo sapiens
aaugcagaacaaagaca

SEQ ID NO: 7342 - RNA, 17 nt, Homo sapiens
gaacaaagacaaaggac

SEQ ID NO: 7343 - RNA, 17 nt, Homo sapiens
gacaaaggacuuuauac

SEQ ID NO: 7344 - RNA, 17 nt, Homo sapiens
uuauacuugucguguaa

SEQ ID NO: 7345 - RNA, 17 nt, Homo sapiens
uacuugucguguaagga

SEQ ID NO: 7346 - RNA, 17 nt, Homo sapiens
cuugucguguaaggagu

SEQ ID NO: 7347 - RNA, 17 nt, Homo sapiens
uguaaggaguggaccau

SEQ ID NO: 7348 - RNA, 17 nt, Homo sapiens
aggaguggaccaucauu

SEQ ID NO: 7349 - RNA, 17 nt, Homo sapiens
ucauucaaaucuguuaa

SEQ ID NO: 7350 - RNA, 17 nt, Homo sapiens
ucaaaucuguuaacacc

SEQ ID NO: 7351 - RNA, 17 nt, Homo sapiens
aucuguuaacaccucag

SEQ ID NO: 7352 - RNA, 17 nt, Homo sapiens
acaccucagugcauaua

SEQ ID NO: 7353 - RNA, 17 nt, Homo sapiens
accucagugcauauaua

SEQ ID NO: 7354 - RNA, 17 nt, Homo sapiens
uauauaugauaaagcau

SEQ ID NO: 7355 - RNA, 17 nt, Homo sapiens
augauaaagcauucauc

SEQ ID NO: 7356 - RNA, 17 nt, Homo sapiens
ucaucacugugaaacau

SEQ ID NO: 7357 - RNA, 17 nt, Homo sapiens
acugugaaacaucgaaa

SEQ ID NO: 7358 - RNA, 17 nt, Homo sapiens
caucgaaaacagcaggu

SEQ ID NO: 7359 - RNA, 17 nt, Homo sapiens
cgaaaacagcaggugcu

SEQ ID NO: 7360 - RNA, 17 nt, Homo sapiens
aacagcaggugcuugaa

SEQ ID NO: 7361 - RNA, 17 nt, Homo sapiens
cagcaggugcuugaaac

SEQ ID NO: 7362 - RNA, 17 nt, Homo sapiens
ugcuugaaaccguagcu

SEQ ID NO: 7363 - RNA, 17 nt, Homo sapiens
uugaaaccguagcuggc

SEQ ID NO: 7364 - RNA, 17 nt, Homo sapiens
aaaccguagcuggcaag

SEQ ID NO: 7365 - RNA, 17 nt, Homo sapiens
cguagcuggcaagcggu

SEQ ID NO: 7366 - RNA, 17 nt, Homo sapiens
gcuggcaagcggucuua

SEQ ID NO: 7367 - RNA, 17 nt, Homo sapiens
ggcaagcggucuuaccg

SEQ ID NO: 7368 - RNA, 17 nt, Homo sapiens
ucuuaccggcucucuau

SEQ ID NO: 7369 - RNA, 17 nt, Homo sapiens
cuaugaaagugaaggca

SEQ ID NO: 7370 - RNA, 17 nt, Homo sapiens
aagugaaggcauuuccc

SEQ ID NO: 7371 - RNA, 17 nt, Homo sapiens
uuucccucgccggaagu

SEQ ID NO: 7372 - RNA, 17 nt, Homo sapiens
cgccggaaguuguaugg

SEQ ID NO: 7373 - RNA, 17 nt, Homo sapiens
cggaaguuguaugguua

SEQ ID NO: 7374 - RNA, 17 nt, Homo sapiens
guuguaugguuaaaaga

SEQ ID NO: 7375 - RNA, 17 nt, Homo sapiens
guuaaaagauggguuac

SEQ ID NO: 7376 - RNA, 17 nt, Homo sapiens
aaagauggguuaccugc

SEQ ID NO: 7377 - RNA, 17 nt, Homo sapiens
gguuaccugcgacugag

SEQ ID NO: 7378 - RNA, 17 nt, Homo sapiens
uaccugcgacugagaaa

SEQ ID NO: 7379 - RNA, 17 nt, Homo sapiens
acugagaaaucugcucg

SEQ ID NO: 7380 - RNA, 17 nt, Homo sapiens
agaaaucugcucgcuau

SEQ ID NO: 7381 - RNA, 17 nt, Homo sapiens
aucugcucgcuauuuga

SEQ ID NO: 7382 - RNA, 17 nt, Homo sapiens
gcuauuugacucguggc

SEQ ID NO: 7383 - RNA, 17 nt, Homo sapiens
uuugacucguggcuacu

SEQ ID NO: 7384 - RNA, 17 nt, Homo sapiens
gacucguggcuacucgu

SEQ ID NO: 7385 - RNA, 17 nt, Homo sapiens
ggcuacucguuaauuau

SEQ ID NO: 7386 - RNA, 17 nt, Homo sapiens
acucguuaauuaucaag

SEQ ID NO: 7387 - RNA, 17 nt, Homo sapiens
uaucaaggacguaacug

SEQ ID NO: 7388 - RNA, 17 nt, Homo sapiens
ucaaggacguaacugaa

SEQ ID NO: 7389 - RNA, 17 nt, Homo sapiens
aggacguaacugaagag

SEQ ID NO: 7390 - RNA, 17 nt, Homo sapiens
ugaagaggaugcaggga

SEQ ID NO: 7391 - RNA, 17 nt, Homo sapiens
aagaggaugcagggaau

SEQ ID NO: 7392 - RNA, 17 nt, Homo sapiens
ugcagggaauuauacaa

SEQ ID NO: 7393 - RNA, 17 nt, Homo sapiens
auuauacaaucuugcug

SEQ ID NO: 7394 - RNA, 17 nt, Homo sapiens
acaaucuugcugagcau

SEQ ID NO: 7395 - RNA, 17 nt, Homo sapiens
cuugcugagcauaaaac

SEQ ID NO: 7396 - RNA, 17 nt, Homo sapiens
agcauaaaacagucaaa

SEQ ID NO: 7397 - RNA, 17 nt, Homo sapiens
auaaaacagucaaaugu

SEQ ID NO: 7398 - RNA, 17 nt, Homo sapiens
acagucaaauguguuua

SEQ ID NO: 7399 - RNA, 17 nt, Homo sapiens
agucaaauguguuuaaa

SEQ ID NO: 7400 - RNA, 17 nt, Homo sapiens
ucaaauguguuuaaaaa

SEQ ID NO: 7401 - RNA, 17 nt, Homo sapiens
guuuaaaaaccucacug

SEQ ID NO: 7402 - RNA, 17 nt, Homo sapiens
accucacugccacucua

SEQ ID NO: 7403 - RNA, 17 nt, Homo sapiens
ccacucuaauugucaau

SEQ ID NO: 7404 - RNA, 17 nt, Homo sapiens
cucuaauugucaaugug

SEQ ID NO: 7405 - RNA, 17 nt, Homo sapiens
aauugucaaugugaaac

SEQ ID NO: 7406 - RNA, 17 nt, Homo sapiens
uugucaaugugaaaccc

SEQ ID NO: 7407 - RNA, 17 nt, Homo sapiens
aaugugaaaccccagau

SEQ ID NO: 7408 - RNA, 17 nt, Homo sapiens
aaccccagauuuacgaa

SEQ ID NO: 7409 - RNA, 17 nt, Homo sapiens
acgaaaaggccguguca

SEQ ID NO: 7410 - RNA, 17 nt, Homo sapiens
aaaaggccgugucaucg

SEQ ID NO: 7411 - RNA, 17 nt, Homo sapiens
aaggccgugucaucguu

SEQ ID NO: 7412 - RNA, 17 nt, Homo sapiens
gugucaucguuuccaga

SEQ ID NO: 7413 - RNA, 17 nt, Homo sapiens
guuuccagacccggcuc

SEQ ID NO: 7414 - RNA, 17 nt, Homo sapiens
cagacccggcucucuac

SEQ ID NO: 7415 - RNA, 17 nt, Homo sapiens
cccacugggcagcagac

SEQ ID NO: 7416 - RNA, 17 nt, Homo sapiens
acugggcagcagacaaa

SEQ ID NO: 7417 - RNA, 17 nt, Homo sapiens
ggcagcagacaaauccu

SEQ ID NO: 7418 - RNA, 17 nt, Homo sapiens
gcagacaaauccugacu

SEQ ID NO: 7419 - RNA, 17 nt, Homo sapiens
aaauccugacuuguacc

SEQ ID NO: 7420 - RNA, 17 nt, Homo sapiens
ccugacuuguaccgcau

SEQ ID NO: 7421 - RNA, 17 nt, Homo sapiens
cuuguaccgcauauggu

SEQ ID NO: 7422 - RNA, 17 nt, Homo sapiens
cgcauaugguaucccuc

SEQ ID NO: 7423 - RNA, 17 nt, Homo sapiens
aucccucaaccuacaau

SEQ ID NO: 7424 - RNA, 17 nt, Homo sapiens
aaccuacaaucaagugg

SEQ ID NO: 7425 - RNA, 17 nt, Homo sapiens
acaaucaagugguucug

SEQ ID NO: 7426 - RNA, 17 nt, Homo sapiens
aucaagugguucuggca

SEQ ID NO: 7427 - RNA, 17 nt, Homo sapiens
ugguucuggcaccccug

SEQ ID NO: 7428 - RNA, 17 nt, Homo sapiens
gcaccccuguaaccaua

SEQ ID NO: 7429 - RNA, 17 nt, Homo sapiens
ccccuguaaccauaauc

SEQ ID NO: 7430 - RNA, 17 nt, Homo sapiens
uaaccauaaucauuccg

SEQ ID NO: 7431 - RNA, 17 nt, Homo sapiens
auuccgaagcaaggugu

SEQ ID NO: 7432 - RNA, 17 nt, Homo sapiens
gaagcaaggugugacuu

SEQ ID NO: 7433 - RNA, 17 nt, Homo sapiens
agcaaggugugacuuuu

SEQ ID NO: 7434 - RNA, 17 nt, Homo sapiens
aaggugugacuuuuguu

SEQ ID NO: 7435 - RNA, 17 nt, Homo sapiens
ugacuuuuguuccaaua

SEQ ID NO: 7436 - RNA, 17 nt, Homo sapiens
uuguuccaauaaugaag

SEQ ID NO: 7437 - RNA, 17 nt, Homo sapiens
uuccaauaaugaagagu

SEQ ID NO: 7438 - RNA, 17 nt, Homo sapiens
aaugaagaguccuuuau

SEQ ID NO: 7439 - RNA, 17 nt, Homo sapiens
uauccuggaugcugaca

SEQ ID NO: 7440 - RNA, 17 nt, Homo sapiens
uccuggaugcugacagc

SEQ ID NO: 7441 - RNA, 17 nt, Homo sapiens
ggaugcugacagcaaca

SEQ ID NO: 7442 - RNA, 17 nt, Homo sapiens
ugcugacagcaacaugg

SEQ ID NO: 7443 - RNA, 17 nt, Homo sapiens
ugacagcaacaugggaa

SEQ ID NO: 7444 - RNA, 17 nt, Homo sapiens
caugggaaacagaauug

SEQ ID NO: 7445 - RNA, 17 nt, Homo sapiens
gaaacagaauugagagc

SEQ ID NO: 7446 - RNA, 17 nt, Homo sapiens
aauugagagcaucacuc

SEQ ID NO: 7447 - RNA, 17 nt, Homo sapiens
aucacucagcgcauggc

SEQ ID NO: 7448 - RNA, 17 nt, Homo sapiens
cacucagcgcauggcaa

SEQ ID NO: 7449 - RNA, 17 nt, Homo sapiens
agcgcauggcaauaaua

SEQ ID NO: 7450 - RNA, 17 nt, Homo sapiens
gcauggcaauaauagaa

SEQ ID NO: 7451 - RNA, 17 nt, Homo sapiens
uggcaauaauagaagga

SEQ ID NO: 7452 - RNA, 17 nt, Homo sapiens
aggaaagaauaagaugg

SEQ ID NO: 7453 - RNA, 17 nt, Homo sapiens
agaauaagauggcuagc

SEQ ID NO: 7454 - RNA, 17 nt, Homo sapiens
auaagauggcuagcacc

SEQ ID NO: 7455 - RNA, 17 nt, Homo sapiens
gauggcuagcaccuugg

SEQ ID NO: 7456 - RNA, 17 nt, Homo sapiens
gcaccuugguuguggcu

SEQ ID NO: 7457 - RNA, 17 nt, Homo sapiens
ccuugguuguggcugac

SEQ ID NO: 7458 - RNA, 17 nt, Homo sapiens
ugguuguggcugacucu

SEQ ID NO: 7459 - RNA, 17 nt, Homo sapiens
uguggcugacucuagaa

SEQ ID NO: 7460 - RNA, 17 nt, Homo sapiens
acucuagaauuucugga

SEQ ID NO: 7461 - RNA, 17 nt, Homo sapiens
uuucuggaaucuacauu

SEQ ID NO: 7462 - RNA, 17 nt, Homo sapiens
cuacauuugcauagcuu

SEQ ID NO: 7463 - RNA, 17 nt, Homo sapiens
uuugcauagcuuccaau

SEQ ID NO: 7464 - RNA, 17 nt, Homo sapiens
agcuuccaauaaaguug

SEQ ID NO: 7465 - RNA, 17 nt, Homo sapiens
ccaauaaaguugggacu

SEQ ID NO: 7466 - RNA, 17 nt, Homo sapiens
aaguugggacuguggga

SEQ ID NO: 7467 - RNA, 17 nt, Homo sapiens
uugggacugugggaaga

SEQ ID NO: 7468 - RNA, 17 nt, Homo sapiens
gggaagaaacauaagcu

SEQ ID NO: 7469 - RNA, 17 nt, Homo sapiens
aaacauaagcuuuuaua

SEQ ID NO: 7470 - RNA, 17 nt, Homo sapiens
uaucacagaugugccaa

SEQ ID NO: 7471 - RNA, 17 nt, Homo sapiens
ucacagaugugccaaau

SEQ ID NO: 7472 - RNA, 17 nt, Homo sapiens
acagaugugccaaaugg

SEQ ID NO: 7473 - RNA, 17 nt, Homo sapiens
ugugccaaauggguuuc

SEQ ID NO: 7474 - RNA, 17 nt, Homo sapiens
ccaaauggguuucaugu

SEQ ID NO: 7475 - RNA, 17 nt, Homo sapiens
gguuucauguuaacuug

SEQ ID NO: 7476 - RNA, 17 nt, Homo sapiens
ucauguuaacuuggaaa

SEQ ID NO: 7477 - RNA, 17 nt, Homo sapiens
uggaaaaaaugccgacg

SEQ ID NO: 7478 - RNA, 17 nt, Homo sapiens
gaaaaaaugccgacgga

SEQ ID NO: 7479 - RNA, 17 nt, Homo sapiens
aaaugccgacggaagga

SEQ ID NO: 7480 - RNA, 17 nt, Homo sapiens
aggagaggaccugaaac

SEQ ID NO: 7481 - RNA, 17 nt, Homo sapiens
gaccugaaacugucuug

SEQ ID NO: 7482 - RNA, 17 nt, Homo sapiens
cugaaacugucuugcac

SEQ ID NO: 7483 - RNA, 17 nt, Homo sapiens
acugucuugcacaguua

SEQ ID NO: 7484 - RNA, 17 nt, Homo sapiens
cuugcacaguuaacaag

SEQ ID NO: 7485 - RNA, 17 nt, Homo sapiens
cacaguuaacaaguucu

SEQ ID NO: 7486 - RNA, 17 nt, Homo sapiens
guuaacaaguucuuaua

SEQ ID NO: 7487 - RNA, 17 nt, Homo sapiens
auacagagacguuacuu

SEQ ID NO: 7488 - RNA, 17 nt, Homo sapiens
acagagacguuacuugg

SEQ ID NO: 7489 - RNA, 17 nt, Homo sapiens
uuacuuggauuuuacug

SEQ ID NO: 7490 - RNA, 17 nt, Homo sapiens
auuuuacugcggacagu

SEQ ID NO: 7491 - RNA, 17 nt, Homo sapiens
uacugcggacaguuaau

SEQ ID NO: 7492 - RNA, 17 nt, Homo sapiens
ugcggacaguuaauaac

SEQ ID NO: 7493 - RNA, 17 nt, Homo sapiens
gacaguuaauaacagaa

SEQ ID NO: 7494 - RNA, 17 nt, Homo sapiens
aguuaauaacagaacaa

SEQ ID NO: 7495 - RNA, 17 nt, Homo sapiens
auaacagaacaaugcac

SEQ ID NO: 7496 - RNA, 17 nt, Homo sapiens
acagaacaaugcacuac

SEQ ID NO: 7497 - RNA, 17 nt, Homo sapiens
agaacaaugcacuacag

SEQ ID NO: 7498 - RNA, 17 nt, Homo sapiens
gcacuacaguauuagca

SEQ ID NO: 7499 - RNA, 17 nt, Homo sapiens
caguauuagcaagcaaa

SEQ ID NO: 7500 - RNA, 17 nt, Homo sapiens
auuagcaagcaaaaaau

SEQ ID NO: 7501 - RNA, 17 nt, Homo sapiens
agcaaaaaauggccauc

SEQ ID NO: 7502 - RNA, 17 nt, Homo sapiens
aaaaaauggccaucacu

SEQ ID NO: 7503 - RNA, 17 nt, Homo sapiens
acuaaggagcacuccau

SEQ ID NO: 7504 - RNA, 17 nt, Homo sapiens
cacucuuaaucuuacca

SEQ ID NO: 7505 - RNA, 17 nt, Homo sapiens
caucaugaauguuuccc

SEQ ID NO: 7506 - RNA, 17 nt, Homo sapiens
ucaugaauguuucccug

SEQ ID NO: 7507 - RNA, 17 nt, Homo sapiens
guuucccugcaagauuc

SEQ ID NO: 7508 - RNA, 17 nt, Homo sapiens
ccugcaagauucaggca

SEQ ID NO: 7509 - RNA, 17 nt, Homo sapiens
agauucaggcaccuaug

SEQ ID NO: 7510 - RNA, 17 nt, Homo sapiens
gcaccuaugccugcaga

SEQ ID NO: 7511 - RNA, 17 nt, Homo sapiens
cuaugccugcagagcca

SEQ ID NO: 7512 - RNA, 17 nt, Homo sapiens
ccugcagagccaggaau

SEQ ID NO: 7513 - RNA, 17 nt, Homo sapiens
agccaggaauguauaca

SEQ ID NO: 7514 - RNA, 17 nt, Homo sapiens
ccaggaauguauacaca

SEQ ID NO: 7515 - RNA, 17 nt, Homo sapiens
gggaagaaauccuccag

SEQ ID NO: 7516 - RNA, 17 nt, Homo sapiens
agaaagaaauuacaauc

SEQ ID NO: 7517 - RNA, 17 nt, Homo sapiens
aaauuacaaucagagau

SEQ ID NO: 7518 - RNA, 17 nt, Homo sapiens
aaucagagaucaggaag

SEQ ID NO: 7519 - RNA, 17 nt, Homo sapiens
aucaggaagcaccauac

SEQ ID NO: 7520 - RNA, 17 nt, Homo sapiens
uaccuccugcgaaaccu

SEQ ID NO: 7521 - RNA, 17 nt, Homo sapiens
ccugcgaaaccucagug

SEQ ID NO: 7522 - RNA, 17 nt, Homo sapiens
aaaccucagugaucaca

SEQ ID NO: 7523 - RNA, 17 nt, Homo sapiens
ccucagugaucacacag

SEQ ID NO: 7524 - RNA, 17 nt, Homo sapiens
aucacacaguggccauc

SEQ ID NO: 7525 - RNA, 17 nt, Homo sapiens
acacaguggccaucagc

SEQ ID NO: 7526 - RNA, 17 nt, Homo sapiens
ggccaucagcaguucca

SEQ ID NO: 7527 - RNA, 17 nt, Homo sapiens
caucagcaguuccacca

SEQ ID NO: 7528 - RNA, 17 nt, Homo sapiens
cacuuuagacugucaug

SEQ ID NO: 7529 - RNA, 17 nt, Homo sapiens
uuuagacugucaugcua

SEQ ID NO: 7530 - RNA, 17 nt, Homo sapiens
acugucaugcuaauggu

SEQ ID NO: 7531 - RNA, 17 nt, Homo sapiens
ucaugcuaauggugucc

SEQ ID NO: 7532 - RNA, 17 nt, Homo sapiens
ugcuaaugguguccccg

SEQ ID NO: 7533 - RNA, 17 nt, Homo sapiens
cuaaugguguccccgag

SEQ ID NO: 7534 - RNA, 17 nt, Homo sapiens
guccccgagccucagau

SEQ ID NO: 7535 - RNA, 17 nt, Homo sapiens
agccucagaucacuugg

SEQ ID NO: 7536 - RNA, 17 nt, Homo sapiens
aucacuugguuuaaaaa

SEQ ID NO: 7537 - RNA, 17 nt, Homo sapiens
guuuaaaaacaaccaca

SEQ ID NO: 7538 - RNA, 17 nt, Homo sapiens
uaaaaacaaccacaaaa

SEQ ID NO: 7539 - RNA, 17 nt, Homo sapiens
accacaaaauacaacaa

SEQ ID NO: 7540 - RNA, 17 nt, Homo sapiens
aaaauacaacaagagcc

SEQ ID NO: 7541 - RNA, 17 nt, Homo sapiens
caacaagagccuggaau

SEQ ID NO: 7542 - RNA, 17 nt, Homo sapiens
agccuggaauuauuuua

SEQ ID NO: 7543 - RNA, 17 nt, Homo sapiens
auuuuaggaccaggaag

SEQ ID NO: 7544 - RNA, 17 nt, Homo sapiens
accaggaagcagcacgc

SEQ ID NO: 7545 - RNA, 17 nt, Homo sapiens
aggaagcagcacgcugu

SEQ ID NO: 7546 - RNA, 17 nt, Homo sapiens
agcagcacgcuguuuau

SEQ ID NO: 7547 - RNA, 17 nt, Homo sapiens
agcacgcuguuuauuga

SEQ ID NO: 7548 - RNA, 17 nt, Homo sapiens
uugaaagagucacagaa

SEQ ID NO: 7549 - RNA, 17 nt, Homo sapiens
agaagaggaugaaggug

SEQ ID NO: 7550 - RNA, 17 nt, Homo sapiens
ggaugaaggugucuauc

SEQ ID NO: 7551 - RNA, 17 nt, Homo sapiens
augaaggugucuaucac

SEQ ID NO: 7552 - RNA, 17 nt, Homo sapiens
cuaucacugcaaagcca

SEQ ID NO: 7553 - RNA, 17 nt, Homo sapiens
acugcaaagccaccaac

SEQ ID NO: 7554 - RNA, 17 nt, Homo sapiens
agccaccaaccagaagg

SEQ ID NO: 7555 - RNA, 17 nt, Homo sapiens
ccagaagggcucugugg

SEQ ID NO: 7556 - RNA, 17 nt, Homo sapiens
agggcucuguggaaagu

SEQ ID NO: 7557 - RNA, 17 nt, Homo sapiens
uguggaaaguucagcau

SEQ ID NO: 7558 - RNA, 17 nt, Homo sapiens
aaaguucagcauaccuc

SEQ ID NO: 7559 - RNA, 17 nt, Homo sapiens
accucacuguucaagga

SEQ ID NO: 7560 - RNA, 17 nt, Homo sapiens
uucaaggaaccucggac

SEQ ID NO: 7561 - RNA, 17 nt, Homo sapiens
aaccucggacaagucua

SEQ ID NO: 7562 - RNA, 17 nt, Homo sapiens
ucggacaagucuaaucu

SEQ ID NO: 7563 - RNA, 17 nt, Homo sapiens
caagucuaaucuggagc

SEQ ID NO: 7564 - RNA, 17 nt, Homo sapiens
aaucuggagcugaucac

SEQ ID NO: 7565 - RNA, 17 nt, Homo sapiens
uggagcugaucacucua

SEQ ID NO: 7566 - RNA, 17 nt, Homo sapiens
ucacucuaacaugcacc

SEQ ID NO: 7567 - RNA, 17 nt, Homo sapiens
ucuaacaugcaccugug

SEQ ID NO: 7568 - RNA, 17 nt, Homo sapiens
augcaccuguguggcug

SEQ ID NO: 7569 - RNA, 17 nt, Homo sapiens
gcaccuguguggcugcg

SEQ ID NO: 7570 - RNA, 17 nt, Homo sapiens
ccuguguggcugcgacu

SEQ ID NO: 7571 - RNA, 17 nt, Homo sapiens
guguggcugcgacucuc

SEQ ID NO: 7572 - RNA, 17 nt, Homo sapiens
uggcugcgacucucuuc

SEQ ID NO: 7573 - RNA, 17 nt, Homo sapiens
cucuucuggcuccuauu

SEQ ID NO: 7574 - RNA, 17 nt, Homo sapiens
uccuauuaacccuccuu

SEQ ID NO: 7575 - RNA, 17 nt, Homo sapiens
uccgaaaaaugaaaagg

SEQ ID NO: 7576 - RNA, 17 nt, Homo sapiens
augaaaaggucuucuuc

SEQ ID NO: 7577 - RNA, 17 nt, Homo sapiens
cuucugaaauaaagacu

SEQ ID NO: 7578 - RNA, 17 nt, Homo sapiens
aaauaaagacugacuac

SEQ ID NO: 7579 - RNA, 17 nt, Homo sapiens
aaagacugacuaccuau

SEQ ID NO: 7580 - RNA, 17 nt, Homo sapiens
accuaucaauuauaaug

SEQ ID NO: 7581 - RNA, 17 nt, Homo sapiens
caauuauaauggaccca

SEQ ID NO: 7582 - RNA, 17 nt, Homo sapiens
uauaauggacccagaug

SEQ ID NO: 7583 - RNA, 17 nt, Homo sapiens
ggacccagaugaaguuc

SEQ ID NO: 7584 - RNA, 17 nt, Homo sapiens
cagaugaaguuccuuug

SEQ ID NO: 7585 - RNA, 17 nt, Homo sapiens
uccuuuggaugagcagu

SEQ ID NO: 7586 - RNA, 17 nt, Homo sapiens
uuggaugagcaguguga

SEQ ID NO: 7587 - RNA, 17 nt, Homo sapiens
gaugagcagugugagcg

SEQ ID NO: 7588 - RNA, 17 nt, Homo sapiens
ugagcagugugagcggc

SEQ ID NO: 7589 - RNA, 17 nt, Homo sapiens
cagugugagcggcuccc

SEQ ID NO: 7590 - RNA, 17 nt, Homo sapiens
ugugagcggcucccuua

SEQ ID NO: 7591 - RNA, 17 nt, Homo sapiens
cccuuaugaugccagca

SEQ ID NO: 7592 - RNA, 17 nt, Homo sapiens
cuuaugaugccagcaag

SEQ ID NO: 7593 - RNA, 17 nt, Homo sapiens
ugaugccagcaaguggg

SEQ ID NO: 7594 - RNA, 17 nt, Homo sapiens
gccagcaagugggaguu

SEQ ID NO: 7595 - RNA, 17 nt, Homo sapiens
aagugggaguuugcccg

SEQ ID NO: 7596 - RNA, 17 nt, Homo sapiens
gggaguuugcccgggag

SEQ ID NO: 7597 - RNA, 17 nt, Homo sapiens
cgggagagacuuaaacu

SEQ ID NO: 7598 - RNA, 17 nt, Homo sapiens
agacuuaaacugggcaa

SEQ ID NO: 7599 - RNA, 17 nt, Homo sapiens
uaaacugggcaaaucac

SEQ ID NO: 7600 - RNA, 17 nt, Homo sapiens
cugggcaaaucacuugg

SEQ ID NO: 7601 - RNA, 17 nt, Homo sapiens
gaagaggggcuuuugga

SEQ ID NO: 7602 - RNA, 17 nt, Homo sapiens
uuggaaaagugguucaa

SEQ ID NO: 7603 - RNA, 17 nt, Homo sapiens
gaaaagugguucaagca

SEQ ID NO: 7604 - RNA, 17 nt, Homo sapiens
ugguucaagcaucagca

SEQ ID NO: 7605 - RNA, 17 nt, Homo sapiens
aagcaucagcauuuggc

SEQ ID NO: 7606 - RNA, 17 nt, Homo sapiens
agcauuuggcauuaaga

SEQ ID NO: 7607 - RNA, 17 nt, Homo sapiens
auuaagaaaucaccuac

SEQ ID NO: 7608 - RNA, 17 nt, Homo sapiens
ucaccuacgugccggac

SEQ ID NO: 7609 - RNA, 17 nt, Homo sapiens
accuacgugccggacug

SEQ ID NO: 7610 - RNA, 17 nt, Homo sapiens
cgugccggacuguggcu

SEQ ID NO: 7611 - RNA, 17 nt, Homo sapiens
gccggacuguggcugug

SEQ ID NO: 7612 - RNA, 17 nt, Homo sapiens
ggacuguggcugugaaa

SEQ ID NO: 7613 - RNA, 17 nt, Homo sapiens
cuguggcugugaaaaug

SEQ ID NO: 7614 - RNA, 17 nt, Homo sapiens
cugugaaaaugcugaaa

SEQ ID NO: 7615 - RNA, 17 nt, Homo sapiens
gugaaaaugcugaaaga

SEQ ID NO: 7616 - RNA, 17 nt, Homo sapiens
aagagggggccacggcc

SEQ ID NO: 7617 - RNA, 17 nt, Homo sapiens
gggccacggccagcgag

SEQ ID NO: 7618 - RNA, 17 nt, Homo sapiens
cacggccagcgaguaca

SEQ ID NO: 7619 - RNA, 17 nt, Homo sapiens
gccagcgaguacaaagc

SEQ ID NO: 7620 - RNA, 17 nt, Homo sapiens
aguacaaagcucugaug

SEQ ID NO: 7621 - RNA, 17 nt, Homo sapiens
aagcucugaugacugag

SEQ ID NO: 7622 - RNA, 17 nt, Homo sapiens
cucugaugacugagcua

SEQ ID NO: 7623 - RNA, 17 nt, Homo sapiens
augacugagcuaaaaau

SEQ ID NO: 7624 - RNA, 17 nt, Homo sapiens
agcuaaaaaucuugacc

SEQ ID NO: 7625 - RNA, 17 nt, Homo sapiens
aaaucuugacccacauu

SEQ ID NO: 7626 - RNA, 17 nt, Homo sapiens
ccacauuggccaccauc

SEQ ID NO: 7627 - RNA, 17 nt, Homo sapiens
ccaucugaacgugguua

SEQ ID NO: 7628 - RNA, 17 nt, Homo sapiens
aucugaacgugguuaac

SEQ ID NO: 7629 - RNA, 17 nt, Homo sapiens
ugaacgugguuaaccug

SEQ ID NO: 7630 - RNA, 17 nt, Homo sapiens
cgugguuaaccugcugg

SEQ ID NO: 7631 - RNA, 17 nt, Homo sapiens
guuaaccugcugggagc

SEQ ID NO: 7632 - RNA, 17 nt, Homo sapiens
ugcugggagccugcacc

SEQ ID NO: 7633 - RNA, 17 nt, Homo sapiens
gggagccugcaccaagc

SEQ ID NO: 7634 - RNA, 17 nt, Homo sapiens
ugcaccaagcaaggagg

SEQ ID NO: 7635 - RNA, 17 nt, Homo sapiens
caaggagggccucugau

SEQ ID NO: 7636 - RNA, 17 nt, Homo sapiens
ggccucugauggugauu

SEQ ID NO: 7637 - RNA, 17 nt, Homo sapiens
cucugauggugauuguu

SEQ ID NO: 7638 - RNA, 17 nt, Homo sapiens
ugauggugauuguugaa

SEQ ID NO: 7639 - RNA, 17 nt, Homo sapiens
uggugauuguugaauac

SEQ ID NO: 7640 - RNA, 17 nt, Homo sapiens
auuguugaauacugcaa

SEQ ID NO: 7641 - RNA, 17 nt, Homo sapiens
ugaauacugcaaauaug

SEQ ID NO: 7642 - RNA, 17 nt, Homo sapiens
uacugcaaauauggaaa

SEQ ID NO: 7643 - RNA, 17 nt, Homo sapiens
auauggaaaucucucca

SEQ ID NO: 7644 - RNA, 17 nt, Homo sapiens
ucucuccaacuaccuca

SEQ ID NO: 7645 - RNA, 17 nt, Homo sapiens
ccucaagagcaaacgug

SEQ ID NO: 7646 - RNA, 17 nt, Homo sapiens
aagagcaaacgugacuu

SEQ ID NO: 7647 - RNA, 17 nt, Homo sapiens
gagcaaacgugacuuau

SEQ ID NO: 7648 - RNA, 17 nt, Homo sapiens
caaacgugacuuauuuu

SEQ ID NO: 7649 - RNA, 17 nt, Homo sapiens
uuuucucaacaaggaug

SEQ ID NO: 7650 - RNA, 17 nt, Homo sapiens
caacaaggaugcagcac

SEQ ID NO: 7651 - RNA, 17 nt, Homo sapiens
acaaggaugcagcacua

SEQ ID NO: 7652 - RNA, 17 nt, Homo sapiens
aggaugcagcacuacac

SEQ ID NO: 7653 - RNA, 17 nt, Homo sapiens
cacauggagccuaagaa

SEQ ID NO: 7654 - RNA, 17 nt, Homo sapiens
aagaaaaaauggagcca

SEQ ID NO: 7655 - RNA, 17 nt, Homo sapiens
aaaauggagccaggccu

SEQ ID NO: 7656 - RNA, 17 nt, Homo sapiens
ggagccaggccuggaac

SEQ ID NO: 7657 - RNA, 17 nt, Homo sapiens
ggccuggaacaaggcaa

SEQ ID NO: 7658 - RNA, 17 nt, Homo sapiens
ggaacaaggcaagaaac

SEQ ID NO: 7659 - RNA, 17 nt, Homo sapiens
ggcaagaaaccaagacu

SEQ ID NO: 7660 - RNA, 17 nt, Homo sapiens
aaaccaagacuagauag

SEQ ID NO: 7661 - RNA, 17 nt, Homo sapiens
aagacuagauagcguca

SEQ ID NO: 7662 - RNA, 17 nt, Homo sapiens
acuagauagcgucacca

SEQ ID NO: 7663 - RNA, 17 nt, Homo sapiens
uagauagcgucaccagc

SEQ ID NO: 7664 - RNA, 17 nt, Homo sapiens
cgucaccagcagcgaaa

SEQ ID NO: 7665 - RNA, 17 nt, Homo sapiens
caccagcagcgaaagcu

SEQ ID NO: 7666 - RNA, 17 nt, Homo sapiens
cagcgaaagcuuugcga

SEQ ID NO: 7667 - RNA, 17 nt, Homo sapiens
aaagcuuugcgagcucc

SEQ ID NO: 7668 - RNA, 17 nt, Homo sapiens
cuuugcgagcuccggcu

SEQ ID NO: 7669 - RNA, 17 nt, Homo sapiens
gagcuccggcuuucagg

SEQ ID NO: 7670 - RNA, 17 nt, Homo sapiens
ucaggaagauaaaaguc

SEQ ID NO: 7671 - RNA, 17 nt, Homo sapiens
agauaaaagucugagug

SEQ ID NO: 7672 - RNA, 17 nt, Homo sapiens
aagucugagugauguug

SEQ ID NO: 7673 - RNA, 17 nt, Homo sapiens
ucugagugauguugagg

SEQ ID NO: 7674 - RNA, 17 nt, Homo sapiens
ugagugauguugaggaa

SEQ ID NO: 7675 - RNA, 17 nt, Homo sapiens
agaggaggauucugacg

SEQ ID NO: 7676 - RNA, 17 nt, Homo sapiens
ggauucugacgguuucu

SEQ ID NO: 7677 - RNA, 17 nt, Homo sapiens
uucugacgguuucuaca

SEQ ID NO: 7678 - RNA, 17 nt, Homo sapiens
uacaaggagcccaucac

SEQ ID NO: 7679 - RNA, 17 nt, Homo sapiens
uauggaagaucugauuu

SEQ ID NO: 7680 - RNA, 17 nt, Homo sapiens
aagaucugauuucuuac

SEQ ID NO: 7681 - RNA, 17 nt, Homo sapiens
uucuuacaguuuucaag

SEQ ID NO: 7682 - RNA, 17 nt, Homo sapiens
guuuucaaguggccaga

SEQ ID NO: 7683 - RNA, 17 nt, Homo sapiens
uucaaguggccagaggc

SEQ ID NO: 7684 - RNA, 17 nt, Homo sapiens
ggccagaggcauggagu

SEQ ID NO: 7685 - RNA, 17 nt, Homo sapiens
ggcauggaguuccuguc

SEQ ID NO: 7686 - RNA, 17 nt, Homo sapiens
gaguuccugucuuccag

SEQ ID NO: 7687 - RNA, 17 nt, Homo sapiens
uccagaaagugcauuca

SEQ ID NO: 7688 - RNA, 17 nt, Homo sapiens
cagaaagugcauucauc

SEQ ID NO: 7689 - RNA, 17 nt, Homo sapiens
ucaucgggaccuggcag

SEQ ID NO: 7690 - RNA, 17 nt, Homo sapiens
gggaccuggcagcgaga

SEQ ID NO: 7691 - RNA, 17 nt, Homo sapiens
accuggcagcgagaaac

SEQ ID NO: 7692 - RNA, 17 nt, Homo sapiens
agcgagaaacauucuuu

SEQ ID NO: 7693 - RNA, 17 nt, Homo sapiens
aucugagaacaacgugg

SEQ ID NO: 7694 - RNA, 17 nt, Homo sapiens
ugagaacaacgugguga

SEQ ID NO: 7695 - RNA, 17 nt, Homo sapiens
agaacaacguggugaag

SEQ ID NO: 7696 - RNA, 17 nt, Homo sapiens
acaacguggugaagauu

SEQ ID NO: 7697 - RNA, 17 nt, Homo sapiens
uggugaagauuugugau

SEQ ID NO: 7698 - RNA, 17 nt, Homo sapiens
gaagauuugugauuuug

SEQ ID NO: 7699 - RNA, 17 nt, Homo sapiens
gauuugugauuuuggcc

SEQ ID NO: 7700 - RNA, 17 nt, Homo sapiens
ugauuuuggccuugccc

SEQ ID NO: 7701 - RNA, 17 nt, Homo sapiens
uuggccuugcccgggau

SEQ ID NO: 7702 - RNA, 17 nt, Homo sapiens
ugcccgggauauuuaua

SEQ ID NO: 7703 - RNA, 17 nt, Homo sapiens
uuauaagaaccccgauu

SEQ ID NO: 7704 - RNA, 17 nt, Homo sapiens
gaaccccgauuauguga

SEQ ID NO: 7705 - RNA, 17 nt, Homo sapiens
ccgauuaugugagaaaa

SEQ ID NO: 7706 - RNA, 17 nt, Homo sapiens
aaaaggagauacucgac

SEQ ID NO: 7707 - RNA, 17 nt, Homo sapiens
gauacucgacuuccucu

SEQ ID NO: 7708 - RNA, 17 nt, Homo sapiens
ccucugaaauggauggc

SEQ ID NO: 7709 - RNA, 17 nt, Homo sapiens
ugaaauggauggcuccc

SEQ ID NO: 7710 - RNA, 17 nt, Homo sapiens
aauggauggcucccgaa

SEQ ID NO: 7711 - RNA, 17 nt, Homo sapiens
gcucccgaaucuaucuu

SEQ ID NO: 7712 - RNA, 17 nt, Homo sapiens
uaucuuugacaaaaucu

SEQ ID NO: 7713 - RNA, 17 nt, Homo sapiens
uugacaaaaucuacagc

SEQ ID NO: 7714 - RNA, 17 nt, Homo sapiens
aaucuacagcaccaaga

SEQ ID NO: 7715 - RNA, 17 nt, Homo sapiens
caccaagagcgacgugu

SEQ ID NO: 7716 - RNA, 17 nt, Homo sapiens
caagagcgacguguggu

SEQ ID NO: 7717 - RNA, 17 nt, Homo sapiens
agagcgacguguggucu

SEQ ID NO: 7718 - RNA, 17 nt, Homo sapiens
agcgacguguggucuua

SEQ ID NO: 7719 - RNA, 17 nt, Homo sapiens
gacguguggucuuacgg

SEQ ID NO: 7720 - RNA, 17 nt, Homo sapiens
cuuacggaguauugcug

SEQ ID NO: 7721 - RNA, 17 nt, Homo sapiens
ggaguauugcuguggga

SEQ ID NO: 7722 - RNA, 17 nt, Homo sapiens
guauugcugugggaaau

SEQ ID NO: 7723 - RNA, 17 nt, Homo sapiens
ugugggaaaucuucucc

SEQ ID NO: 7724 - RNA, 17 nt, Homo sapiens
cuccuuaggugggucuc

SEQ ID NO: 7725 - RNA, 17 nt, Homo sapiens
uuaggugggucuccaua

SEQ ID NO: 7726 - RNA, 17 nt, Homo sapiens
acccaggaguacaaaug

SEQ ID NO: 7727 - RNA, 17 nt, Homo sapiens
gaguacaaauggaugag

SEQ ID NO: 7728 - RNA, 17 nt, Homo sapiens
acaaauggaugaggacu

SEQ ID NO: 7729 - RNA, 17 nt, Homo sapiens
ggaugaggacuuuugca

SEQ ID NO: 7730 - RNA, 17 nt, Homo sapiens
ggacuuuugcagucgcc

SEQ ID NO: 7731 - RNA, 17 nt, Homo sapiens
cuuuugcagucgccuga

SEQ ID NO: 7732 - RNA, 17 nt, Homo sapiens
uugcagucgccugaggg

SEQ ID NO: 7733 - RNA, 17 nt, Homo sapiens
gagggaaggcaugagga

SEQ ID NO: 7734 - RNA, 17 nt, Homo sapiens
gcaugaggaugagagcu

SEQ ID NO: 7735 - RNA, 17 nt, Homo sapiens
ggaugagagcuccugag

SEQ ID NO: 7736 - RNA, 17 nt, Homo sapiens
gcuccugaguacucuac

SEQ ID NO: 7737 - RNA, 17 nt, Homo sapiens
cuccugaaaucuaucag

SEQ ID NO: 7738 - RNA, 17 nt, Homo sapiens
ucuaucagaucaugcug

SEQ ID NO: 7739 - RNA, 17 nt, Homo sapiens
cagaucaugcuggacug

SEQ ID NO: 7740 - RNA, 17 nt, Homo sapiens
caugcuggacugcuggc

SEQ ID NO: 7741 - RNA, 17 nt, Homo sapiens
gcuggacugcuggcaca

SEQ ID NO: 7742 - RNA, 17 nt, Homo sapiens
gacugcuggcacagaga

SEQ ID NO: 7743 - RNA, 17 nt, Homo sapiens
gcacagagacccaaaag

SEQ ID NO: 7744 - RNA, 17 nt, Homo sapiens
aaagaaaggccaagauu

SEQ ID NO: 7745 - RNA, 17 nt, Homo sapiens
aggccaagauuugcaga

SEQ ID NO: 7746 - RNA, 17 nt, Homo sapiens
caagauuugcagaacuu

SEQ ID NO: 7747 - RNA, 17 nt, Homo sapiens
uuugcagaacuugugga

SEQ ID NO: 7748 - RNA, 17 nt, Homo sapiens
cagaacuuguggaaaaa

SEQ ID NO: 7749 - RNA, 17 nt, Homo sapiens
guggaaaaacuagguga

SEQ ID NO: 7750 - RNA, 17 nt, Homo sapiens
aaaacuaggugauuugc

SEQ ID NO: 7751 - RNA, 17 nt, Homo sapiens
acuaggugauuugcuuc

SEQ ID NO: 7752 - RNA, 17 nt, Homo sapiens
ggugauuugcuucaagc

SEQ ID NO: 7753 - RNA, 17 nt, Homo sapiens
ugcuucaagcaaaugua

SEQ ID NO: 7754 - RNA, 17 nt, Homo sapiens
ucaagcaaauguacaac

SEQ ID NO: 7755 - RNA, 17 nt, Homo sapiens
aagcaaauguacaacag

SEQ ID NO: 7756 - RNA, 17 nt, Homo sapiens
aauguacaacaggaugg

SEQ ID NO: 7757 - RNA, 17 nt, Homo sapiens
acaacaggaugguaaag

SEQ ID NO: 7758 - RNA, 17 nt, Homo sapiens
acaggaugguaaagacu

SEQ ID NO: 7759 - RNA, 17 nt, Homo sapiens
ugguaaagacuacaucc

SEQ ID NO: 7760 - RNA, 17 nt, Homo sapiens
acaucccaaucaaugcc

SEQ ID NO: 7761 - RNA, 17 nt, Homo sapiens
cccaaucaaugccauac

SEQ ID NO: 7762 - RNA, 17 nt, Homo sapiens
caaucaaugccauacug

SEQ ID NO: 7763 - RNA, 17 nt, Homo sapiens
ccauacugacaggaaau

SEQ ID NO: 7764 - RNA, 17 nt, Homo sapiens
gacaggaaauagugggu

SEQ ID NO: 7765 - RNA, 17 nt, Homo sapiens
aggaaauaguggguuua

SEQ ID NO: 7766 - RNA, 17 nt, Homo sapiens
aauaguggguuuacaua

SEQ ID NO: 7767 - RNA, 17 nt, Homo sapiens
cauacucaacuccugcc

SEQ ID NO: 7768 - RNA, 17 nt, Homo sapiens
caacuccugccuucucu

SEQ ID NO: 7769 - RNA, 17 nt, Homo sapiens
cucugaggacuucuuca

SEQ ID NO: 7770 - RNA, 17 nt, Homo sapiens
caaggaaaguauuucag

SEQ ID NO: 7771 - RNA, 17 nt, Homo sapiens
guauuucagcuccgaag

SEQ ID NO: 7772 - RNA, 17 nt, Homo sapiens
gcuccgaaguuuaauuc

SEQ ID NO: 7773 - RNA, 17 nt, Homo sapiens
gaaguuuaauucaggaa

SEQ ID NO: 7774 - RNA, 17 nt, Homo sapiens
uucaggaagcucugaug

SEQ ID NO: 7775 - RNA, 17 nt, Homo sapiens
aagcucugaugauguca

SEQ ID NO: 7776 - RNA, 17 nt, Homo sapiens
cucugaugaugucagau

SEQ ID NO: 7777 - RNA, 17 nt, Homo sapiens
cugaugaugucagauau

SEQ ID NO: 7778 - RNA, 17 nt, Homo sapiens
gaugucagauauguaaa

SEQ ID NO: 7779 - RNA, 17 nt, Homo sapiens
ucagauauguaaaugcu

SEQ ID NO: 7780 - RNA, 17 nt, Homo sapiens
auauguaaaugcuuuca

SEQ ID NO: 7781 - RNA, 17 nt, Homo sapiens
auguaaaugcuuucaag

SEQ ID NO: 7782 - RNA, 17 nt, Homo sapiens
gcuuucaaguucaugag

SEQ ID NO: 7783 - RNA, 17 nt, Homo sapiens
guucaugagccuggaaa

SEQ ID NO: 7784 - RNA, 17 nt, Homo sapiens
uggaaagaaucaaaacc

SEQ ID NO: 7785 - RNA, 17 nt, Homo sapiens
gaaucaaaaccuuugaa

SEQ ID NO: 7786 - RNA, 17 nt, Homo sapiens
uuugaagaacuuuuacc

SEQ ID NO: 7787 - RNA, 17 nt, Homo sapiens
uuuaccgaaugccaccu

SEQ ID NO: 7788 - RNA, 17 nt, Homo sapiens
uaccgaaugccaccucc

SEQ ID NO: 7789 - RNA, 17 nt, Homo sapiens
accuccauguuugauga

SEQ ID NO: 7790 - RNA, 17 nt, Homo sapiens
cauguuugaugacuacc

SEQ ID NO: 7791 - RNA, 17 nt, Homo sapiens
guuugaugacuaccagg

SEQ ID NO: 7792 - RNA, 17 nt, Homo sapiens
cuaccagggcgacagca

SEQ ID NO: 7793 - RNA, 17 nt, Homo sapiens
ccagggcgacagcagca

SEQ ID NO: 7794 - RNA, 17 nt, Homo sapiens
gggcgacagcagcacuc

SEQ ID NO: 7795 - RNA, 17 nt, Homo sapiens
cgacagcagcacucugu

SEQ ID NO: 7796 - RNA, 17 nt, Homo sapiens
agcacucuguuggccuc

SEQ ID NO: 7797 - RNA, 17 nt, Homo sapiens
cucuguuggccucuccc

SEQ ID NO: 7798 - RNA, 17 nt, Homo sapiens
ucucccaugcugaagcg

SEQ ID NO: 7799 - RNA, 17 nt, Homo sapiens
augcugaagcgcuucac

SEQ ID NO: 7800 - RNA, 17 nt, Homo sapiens
gcugaagcgcuucaccu

SEQ ID NO: 7801 - RNA, 17 nt, Homo sapiens
ucaccuggacugacagc

SEQ ID NO: 7802 - RNA, 17 nt, Homo sapiens
cuggacugacagcaaac

SEQ ID NO: 7803 - RNA, 17 nt, Homo sapiens
gacugacagcaaaccca

SEQ ID NO: 7804 - RNA, 17 nt, Homo sapiens
gacagcaaacccaaggc

SEQ ID NO: 7805 - RNA, 17 nt, Homo sapiens
aacccaaggccucgcuc

SEQ ID NO: 7806 - RNA, 17 nt, Homo sapiens
aaggccucgcucaagau

SEQ ID NO: 7807 - RNA, 17 nt, Homo sapiens
cgcucaagauugacuug

SEQ ID NO: 7808 - RNA, 17 nt, Homo sapiens
caagauugacuugagag

SEQ ID NO: 7809 - RNA, 17 nt, Homo sapiens
acuugagaguaaccagu

SEQ ID NO: 7810 - RNA, 17 nt, Homo sapiens
ugagaguaaccaguaaa

SEQ ID NO: 7811 - RNA, 17 nt, Homo sapiens
aguaaccaguaaaagua

SEQ ID NO: 7812 - RNA, 17 nt, Homo sapiens
caguaaaaguaaggagu

SEQ ID NO: 7813 - RNA, 17 nt, Homo sapiens
aguaaggagucggggcu

SEQ ID NO: 7814 - RNA, 17 nt, Homo sapiens
gagucggggcugucuga

SEQ ID NO: 7815 - RNA, 17 nt, Homo sapiens
ucggggcugucugaugu

SEQ ID NO: 7816 - RNA, 17 nt, Homo sapiens
gcugucugaugucagca

SEQ ID NO: 7817 - RNA, 17 nt, Homo sapiens
ugucugaugucagcagg

SEQ ID NO: 7818 - RNA, 17 nt, Homo sapiens
ugaugucagcaggccca

SEQ ID NO: 7819 - RNA, 17 nt, Homo sapiens
gucagcaggcccaguuu

SEQ ID NO: 7820 - RNA, 17 nt, Homo sapiens
caggcccaguuucugcc

SEQ ID NO: 7821 - RNA, 17 nt, Homo sapiens
caguuucugccauucca

SEQ ID NO: 7822 - RNA, 17 nt, Homo sapiens
ccauuccagcugugggc

SEQ ID NO: 7823 - RNA, 17 nt, Homo sapiens
uuccagcugugggcacg

SEQ ID NO: 7824 - RNA, 17 nt, Homo sapiens
agcugugggcacgucag

SEQ ID NO: 7825 - RNA, 17 nt, Homo sapiens
gugggcacgucagcgaa

SEQ ID NO: 7826 - RNA, 17 nt, Homo sapiens
gcacgucagcgaaggca

SEQ ID NO: 7827 - RNA, 17 nt, Homo sapiens
cagcgaaggcaagcgca

SEQ ID NO: 7828 - RNA, 17 nt, Homo sapiens
gaaggcaagcgcagguu

SEQ ID NO: 7829 - RNA, 17 nt, Homo sapiens
aggcaagcgcagguuca

SEQ ID NO: 7830 - RNA, 17 nt, Homo sapiens
aagcgcagguucaccua

SEQ ID NO: 7831 - RNA, 17 nt, Homo sapiens
caccuacgaccacgcug

SEQ ID NO: 7832 - RNA, 17 nt, Homo sapiens
acgaccacgcugagcug

SEQ ID NO: 7833 - RNA, 17 nt, Homo sapiens
cacgcugagcuggaaag

SEQ ID NO: 7834 - RNA, 17 nt, Homo sapiens
aaaggaaaaucgcgugc

SEQ ID NO: 7835 - RNA, 17 nt, Homo sapiens
ggaaaaucgcgugcugc

SEQ ID NO: 7836 - RNA, 17 nt, Homo sapiens
aaaaucgcgugcugcuc

SEQ ID NO: 7837 - RNA, 17 nt, Homo sapiens
aaucgcgugcugcuccc

SEQ ID NO: 7838 - RNA, 17 nt, Homo sapiens
cgcgugcugcuccccgc

SEQ ID NO: 7839 - RNA, 17 nt, Homo sapiens
ugcuccccgcccccaga

SEQ ID NO: 7840 - RNA, 17 nt, Homo sapiens
gcccccagacuacaacu

SEQ ID NO: 7841 - RNA, 17 nt, Homo sapiens
agacuacaacucggugg

SEQ ID NO: 7842 - RNA, 17 nt, Homo sapiens
acaacucggugguccug

SEQ ID NO: 7843 - RNA, 17 nt, Homo sapiens
acucggugguccuguac

SEQ ID NO: 7844 - RNA, 17 nt, Homo sapiens
gugguccuguacuccac

SEQ ID NO: 7845 - RNA, 17 nt, Homo sapiens
caucuagaguuugacac

SEQ ID NO: 7846 - RNA, 17 nt, Homo sapiens
agaguuugacacgaagc

SEQ ID NO: 7847 - RNA, 17 nt, Homo sapiens
gacacgaagccuuauuu

SEQ ID NO: 7848 - RNA, 17 nt, Homo sapiens
uucuagaagcacaugug

SEQ ID NO: 7849 - RNA, 17 nt, Homo sapiens
aagcacauguguauuua

SEQ ID NO: 7850 - RNA, 17 nt, Homo sapiens
gcacauguguauuuaua

SEQ ID NO: 7851 - RNA, 17 nt, Homo sapiens
cccaggaaacuagcuuu

SEQ ID NO: 7852 - RNA, 17 nt, Homo sapiens
ggaaacuagcuuuugcc

SEQ ID NO: 7853 - RNA, 17 nt, Homo sapiens
uagcuuuugccaguauu

SEQ ID NO: 7854 - RNA, 17 nt, Homo sapiens
uuuugccaguauuaugc

SEQ ID NO: 7855 - RNA, 17 nt, Homo sapiens
aguauuaugcauauaua

SEQ ID NO: 7856 - RNA, 17 nt, Homo sapiens
auauauaaguuuacacc

SEQ ID NO: 7857 - RNA, 17 nt, Homo sapiens
ccaugggagccagcugc

SEQ ID NO: 7858 - RNA, 17 nt, Homo sapiens
gggagccagcugcuuuu

SEQ ID NO: 7859 - RNA, 17 nt, Homo sapiens
agccagcugcuuuuugu

SEQ ID NO: 7860 - RNA, 17 nt, Homo sapiens
ugcuuuuugugauuuuu

SEQ ID NO: 7861 - RNA, 17 nt, Homo sapiens
uuuuugugauuuuuuua

SEQ ID NO: 7862 - RNA, 17 nt, Homo sapiens
uuuuuuuaauagugcuu

SEQ ID NO: 7863 - RNA, 17 nt, Homo sapiens
uuuuaauagugcuuuuu

SEQ ID NO: 7864 - RNA, 17 nt, Homo sapiens
uuaauagugcuuuuuuu

SEQ ID NO: 7865 - RNA, 17 nt, Homo sapiens
uuuuuuugacuaacaag

SEQ ID NO: 7866 - RNA, 17 nt, Homo sapiens
uuugacuaacaagaaug

SEQ ID NO: 7867 - RNA, 17 nt, Homo sapiens
uaacaagaauguaacuc

SEQ ID NO: 7868 - RNA, 17 nt, Homo sapiens
acaagaauguaacucca

SEQ ID NO: 7869 - RNA, 17 nt, Homo sapiens
agaauguaacuccagau

SEQ ID NO: 7870 - RNA, 17 nt, Homo sapiens
aacuccagauagagaaa

SEQ ID NO: 7871 - RNA, 17 nt, Homo sapiens
auagagaaauagugaca

SEQ ID NO: 7872 - RNA, 17 nt, Homo sapiens
gagaaauagugacaagu

SEQ ID NO: 7873 - RNA, 17 nt, Homo sapiens
aaauagugacaagugaa

SEQ ID NO: 7874 - RNA, 17 nt, Homo sapiens
agugacaagugaagaac

SEQ ID NO: 7875 - RNA, 17 nt, Homo sapiens
agugaagaacacuacug

SEQ ID NO: 7876 - RNA, 17 nt, Homo sapiens
acacuacugcuaaaucc

SEQ ID NO: 7877 - RNA, 17 nt, Homo sapiens
acugcuaaauccucaug

SEQ ID NO: 7878 - RNA, 17 nt, Homo sapiens
auccucauguuacucag

SEQ ID NO: 7879 - RNA, 17 nt, Homo sapiens
guuacucaguguuagag

SEQ ID NO: 7880 - RNA, 17 nt, Homo sapiens
uacucaguguuagagaa

SEQ ID NO: 7881 - RNA, 17 nt, Homo sapiens
uuagagaaauccuuccu

SEQ ID NO: 7882 - RNA, 17 nt, Homo sapiens
cuuccuaaacccaauga

SEQ ID NO: 7883 - RNA, 17 nt, Homo sapiens
uaaacccaaugacuucc

SEQ ID NO: 7884 - RNA, 17 nt, Homo sapiens
acccaaugacuucccug

SEQ ID NO: 7885 - RNA, 17 nt, Homo sapiens
acuucccugcuccaacc

SEQ ID NO: 7886 - RNA, 17 nt, Homo sapiens
cugcuccaacccccgcc

SEQ ID NO: 7887 - RNA, 17 nt, Homo sapiens
caacccccgccaccuca

SEQ ID NO: 7888 - RNA, 17 nt, Homo sapiens
accucagggcacgcagg

SEQ ID NO: 7889 - RNA, 17 nt, Homo sapiens
cagggcacgcaggacca

SEQ ID NO: 7890 - RNA, 17 nt, Homo sapiens
cacgcaggaccaguuug

SEQ ID NO: 7891 - RNA, 17 nt, Homo sapiens
caggaccaguuugauug

SEQ ID NO: 7892 - RNA, 17 nt, Homo sapiens
ccaguuugauugaggag

SEQ ID NO: 7893 - RNA, 17 nt, Homo sapiens
auugaggagcugcacug

SEQ ID NO: 7894 - RNA, 17 nt, Homo sapiens
gaggagcugcacugauc

SEQ ID NO: 7895 - RNA, 17 nt, Homo sapiens
cugcacugaucacccaa

SEQ ID NO: 7896 - RNA, 17 nt, Homo sapiens
aucacccaaugcaucac

SEQ ID NO: 7897 - RNA, 17 nt, Homo sapiens
cacccaaugcaucacgu

SEQ ID NO: 7898 - RNA, 17 nt, Homo sapiens
ugcaucacguaccccac

SEQ ID NO: 7899 - RNA, 17 nt, Homo sapiens
cccacugggccagcccu

SEQ ID NO: 7900 - RNA, 17 nt, Homo sapiens
cugggccagcccugcag

SEQ ID NO: 7901 - RNA, 17 nt, Homo sapiens
ccagcccugcagcccaa

SEQ ID NO: 7902 - RNA, 17 nt, Homo sapiens
gcccugcagcccaaaac

SEQ ID NO: 7903 - RNA, 17 nt, Homo sapiens
agcccaaaacccagggc

SEQ ID NO: 7904 - RNA, 17 nt, Homo sapiens
aacccagggcaacaagc

SEQ ID NO: 7905 - RNA, 17 nt, Homo sapiens
ccagggcaacaagcccg

SEQ ID NO: 7906 - RNA, 17 nt, Homo sapiens
ggcaacaagcccguuag

SEQ ID NO: 7907 - RNA, 17 nt, Homo sapiens
acaagcccguuagcccc

SEQ ID NO: 7908 - RNA, 17 nt, Homo sapiens
gcccguuagccccaggg

SEQ ID NO: 7909 - RNA, 17 nt, Homo sapiens
cccaggggaucacuggc

SEQ ID NO: 7910 - RNA, 17 nt, Homo sapiens
gaucacuggcuggccug

SEQ ID NO: 7911 - RNA, 17 nt, Homo sapiens
acuggcuggccugagca

SEQ ID NO: 7912 - RNA, 17 nt, Homo sapiens
uggccugagcaacaucu

SEQ ID NO: 7913 - RNA, 17 nt, Homo sapiens
ccugagcaacaucucgg

SEQ ID NO: 7914 - RNA, 17 nt, Homo sapiens
ucucgggaguccucuag

SEQ ID NO: 7915 - RNA, 17 nt, Homo sapiens
guccucuagcaggccua

SEQ ID NO: 7916 - RNA, 17 nt, Homo sapiens
ucuagcaggccuaagac

SEQ ID NO: 7917 - RNA, 17 nt, Homo sapiens
ggccuaagacaugugag

SEQ ID NO: 7918 - RNA, 17 nt, Homo sapiens
uaagacaugugaggagg

SEQ ID NO: 7919 - RNA, 17 nt, Homo sapiens
gaaaaaaagcaaaaagc

SEQ ID NO: 7920 - RNA, 17 nt, Homo sapiens
agcaaaaagcaagggag

SEQ ID NO: 7921 - RNA, 17 nt, Homo sapiens
aaagagaaaccgggaga

SEQ ID NO: 7922 - RNA, 17 nt, Homo sapiens
gggagaaggcaugagaa

SEQ ID NO: 7923 - RNA, 17 nt, Homo sapiens
gagaaagaauuugagac

SEQ ID NO: 7924 - RNA, 17 nt, Homo sapiens
aauuugagacgcaccau

SEQ ID NO: 7925 - RNA, 17 nt, Homo sapiens
uuugagacgcaccaugu

SEQ ID NO: 7926 - RNA, 17 nt, Homo sapiens
cgcaccaugugggcacg

SEQ ID NO: 7927 - RNA, 17 nt, Homo sapiens
ccaugugggcacggagg

SEQ ID NO: 7928 - RNA, 17 nt, Homo sapiens
ggagggggacggggcuc

SEQ ID NO: 7929 - RNA, 17 nt, Homo sapiens
gggacggggcucagcaa

SEQ ID NO: 7930 - RNA, 17 nt, Homo sapiens
ggggcucagcaaugcca

SEQ ID NO: 7931 - RNA, 17 nt, Homo sapiens
gcucagcaaugccauuu

SEQ ID NO: 7932 - RNA, 17 nt, Homo sapiens
ucagcaaugccauuuca

SEQ ID NO: 7933 - RNA, 17 nt, Homo sapiens
ccauuucaguggcuucc

SEQ ID NO: 7934 - RNA, 17 nt, Homo sapiens
uuucaguggcuucccag

SEQ ID NO: 7935 - RNA, 17 nt, Homo sapiens
gcuucccagcucugacc

SEQ ID NO: 7936 - RNA, 17 nt, Homo sapiens
cagcucugacccuucua

SEQ ID NO: 7937 - RNA, 17 nt, Homo sapiens
auuugagggcccagcca

SEQ ID NO: 7938 - RNA, 17 nt, Homo sapiens
agggcccagccaggagc

SEQ ID NO: 7939 - RNA, 17 nt, Homo sapiens
agccaggagcagaugga

SEQ ID NO: 7940 - RNA, 17 nt, Homo sapiens
aggagcagauggacagc

SEQ ID NO: 7941 - RNA, 17 nt, Homo sapiens
gcagauggacagcgaug

SEQ ID NO: 7942 - RNA, 17 nt, Homo sapiens
gauggacagcgaugagg

SEQ ID NO: 7943 - RNA, 17 nt, Homo sapiens
ggacagcgaugagggga

SEQ ID NO: 7944 - RNA, 17 nt, Homo sapiens
augaggggacauuuucu

SEQ ID NO: 7945 - RNA, 17 nt, Homo sapiens
uuuucuggauucuggga

SEQ ID NO: 7946 - RNA, 17 nt, Homo sapiens
ucugggaggcaagaaaa

SEQ ID NO: 7947 - RNA, 17 nt, Homo sapiens
agaaaaggacaaauauc

SEQ ID NO: 7948 - RNA, 17 nt, Homo sapiens
aaggacaaauaucuuuu

SEQ ID NO: 7949 - RNA, 17 nt, Homo sapiens
uuuuuggaacuaaagca

SEQ ID NO: 7950 - RNA, 17 nt, Homo sapiens
gaacuaaagcaaauuuu

SEQ ID NO: 7951 - RNA, 17 nt, Homo sapiens
uaaagcaaauuuuagac

SEQ ID NO: 7952 - RNA, 17 nt, Homo sapiens
aauuuuagaccuuuacc

SEQ ID NO: 7953 - RNA, 17 nt, Homo sapiens
cuauggaagugguucua

SEQ ID NO: 7954 - RNA, 17 nt, Homo sapiens
uggaagugguucuaugu

SEQ ID NO: 7955 - RNA, 17 nt, Homo sapiens
gguucuauguccauucu

SEQ ID NO: 7956 - RNA, 17 nt, Homo sapiens
ucucauucguggcaugu

SEQ ID NO: 7957 - RNA, 17 nt, Homo sapiens
cauucguggcauguuuu

SEQ ID NO: 7958 - RNA, 17 nt, Homo sapiens
cguggcauguuuugauu

SEQ ID NO: 7959 - RNA, 17 nt, Homo sapiens
auguuuugauuuguagc

SEQ ID NO: 7960 - RNA, 17 nt, Homo sapiens
uuugauuuguagcacug

SEQ ID NO: 7961 - RNA, 17 nt, Homo sapiens
gauuuguagcacugagg

SEQ ID NO: 7962 - RNA, 17 nt, Homo sapiens
cacugaggguggcacuc

SEQ ID NO: 7963 - RNA, 17 nt, Homo sapiens
ugaggguggcacucaac

SEQ ID NO: 7964 - RNA, 17 nt, Homo sapiens
ggcacucaacucugagc

SEQ ID NO: 7965 - RNA, 17 nt, Homo sapiens
aacucugagcccauacu

SEQ ID NO: 7966 - RNA, 17 nt, Homo sapiens
uacuuuuggcuccucua

SEQ ID NO: 7967 - RNA, 17 nt, Homo sapiens
cuccucuaguaagaugc

SEQ ID NO: 7968 - RNA, 17 nt, Homo sapiens
cuaguaagaugcacuga

SEQ ID NO: 7969 - RNA, 17 nt, Homo sapiens
aguaagaugcacugaaa

SEQ ID NO: 7970 - RNA, 17 nt, Homo sapiens
cacugaaaacuuagcca

SEQ ID NO: 7971 - RNA, 17 nt, Homo sapiens
aaaacuuagccagaguu

SEQ ID NO: 7972 - RNA, 17 nt, Homo sapiens
uagccagaguuagguug

SEQ ID NO: 7973 - RNA, 17 nt, Homo sapiens
agaguuagguugucucc

SEQ ID NO: 7974 - RNA, 17 nt, Homo sapiens
guuagguugucuccagg

SEQ ID NO: 7975 - RNA, 17 nt, Homo sapiens
gucuccaggccaugaug

SEQ ID NO: 7976 - RNA, 17 nt, Homo sapiens
aggccaugauggccuua

SEQ ID NO: 7977 - RNA, 17 nt, Homo sapiens
ccaugauggccuuacac

SEQ ID NO: 7978 - RNA, 17 nt, Homo sapiens
cacugaaaaugucacau

SEQ ID NO: 7979 - RNA, 17 nt, Homo sapiens
cugaaaaugucacauuc

SEQ ID NO: 7980 - RNA, 17 nt, Homo sapiens
uauuuuggguauuaaua

SEQ ID NO: 7981 - RNA, 17 nt, Homo sapiens
ggguauuaauauauagu

SEQ ID NO: 7982 - RNA, 17 nt, Homo sapiens
aauauauaguccagaca

SEQ ID NO: 7983 - RNA, 17 nt, Homo sapiens
uaguccagacacuuaac

SEQ ID NO: 7984 - RNA, 17 nt, Homo sapiens
gacacuuaacucaauuu

SEQ ID NO: 7985 - RNA, 17 nt, Homo sapiens
uuaacucaauuucuugg

SEQ ID NO: 7986 - RNA, 17 nt, Homo sapiens
auuucuugguauuauuc

SEQ ID NO: 7987 - RNA, 17 nt, Homo sapiens
auuauucuguuuugcac

SEQ ID NO: 7988 - RNA, 17 nt, Homo sapiens
ucuguuuugcacaguua

SEQ ID NO: 7989 - RNA, 17 nt, Homo sapiens
uuugcacaguuaguugu

SEQ ID NO: 7990 - RNA, 17 nt, Homo sapiens
cacaguuaguugugaaa

SEQ ID NO: 7991 - RNA, 17 nt, Homo sapiens
aguuaguugugaaagaa

SEQ ID NO: 7992 - RNA, 17 nt, Homo sapiens
gaaagaaagcugagaag

SEQ ID NO: 7993 - RNA, 17 nt, Homo sapiens
ugagaagaaugaaaaug

SEQ ID NO: 7994 - RNA, 17 nt, Homo sapiens
gaaugaaaaugcagucc

SEQ ID NO: 7995 - RNA, 17 nt, Homo sapiens
augaaaaugcaguccug

SEQ ID NO: 7996 - RNA, 17 nt, Homo sapiens
aaaaugcaguccugagg

SEQ ID NO: 7997 - RNA, 17 nt, Homo sapiens
ugaggagaguuuucucc

SEQ ID NO: 7998 - RNA, 17 nt, Homo sapiens
auaucaaaacgagggcu

SEQ ID NO: 7999 - RNA, 17 nt, Homo sapiens
aaacgagggcugaugga

SEQ ID NO: 8000 - RNA, 17 nt, Homo sapiens
gagggcugauggaggaa

SEQ ID NO: 8001 - RNA, 17 nt, Homo sapiens
ggaaaaaggucaauaag

SEQ ID NO: 8002 - RNA, 17 nt, Homo sapiens
aaaggucaauaagguca

SEQ ID NO: 8003 - RNA, 17 nt, Homo sapiens
ucaauaaggucaaggga

SEQ ID NO: 8004 - RNA, 17 nt, Homo sapiens
aagggaagaccccgucu

SEQ ID NO: 8005 - RNA, 17 nt, Homo sapiens
aagaccccgucucuaua

SEQ ID NO: 8006 - RNA, 17 nt, Homo sapiens
cuauaccaaccaaacca

SEQ ID NO: 8007 - RNA, 17 nt, Homo sapiens
ccaaccaaaccaauuca

SEQ ID NO: 8008 - RNA, 17 nt, Homo sapiens
ccaaaccaauucaccaa

SEQ ID NO: 8009 - RNA, 17 nt, Homo sapiens
auucaccaacacaguug

SEQ ID NO: 8010 - RNA, 17 nt, Homo sapiens
ccaacacaguugggacc

SEQ ID NO: 8011 - RNA, 17 nt, Homo sapiens
caguugggacccaaaac

SEQ ID NO: 8012 - RNA, 17 nt, Homo sapiens
gacccaaaacacaggaa

SEQ ID NO: 8013 - RNA, 17 nt, Homo sapiens
cacaggaagucagucac

SEQ ID NO: 8014 - RNA, 17 nt, Homo sapiens
ggaagucagucacguuu

SEQ ID NO: 8015 - RNA, 17 nt, Homo sapiens
ucagucacguuuccuuu

SEQ ID NO: 8016 - RNA, 17 nt, Homo sapiens
uucauuuaauggggauu

SEQ ID NO: 8017 - RNA, 17 nt, Homo sapiens
uaauggggauuccacua

SEQ ID NO: 8018 - RNA, 17 nt, Homo sapiens
ucacacuaaucugaaag

SEQ ID NO: 8019 - RNA, 17 nt, Homo sapiens
cugaaaggauguggaag

SEQ ID NO: 8020 - RNA, 17 nt, Homo sapiens
gaaaggauguggaagag

SEQ ID NO: 8021 - RNA, 17 nt, Homo sapiens
guggaagagcauuagcu

SEQ ID NO: 8022 - RNA, 17 nt, Homo sapiens
gagcauuagcuggcgca

SEQ ID NO: 8023 - RNA, 17 nt, Homo sapiens
auuagcuggcgcauauu

SEQ ID NO: 8024 - RNA, 17 nt, Homo sapiens
uagcuggcgcauauuaa

SEQ ID NO: 8025 - RNA, 17 nt, Homo sapiens
cauauuaagcacuuuaa

SEQ ID NO: 8026 - RNA, 17 nt, Homo sapiens
cacuuuaagcuccuuga

SEQ ID NO: 8027 - RNA, 17 nt, Homo sapiens
cuccuugaguaaaaagg

SEQ ID NO: 8028 - RNA, 17 nt, Homo sapiens
guaaaaaggugguaugu

SEQ ID NO: 8029 - RNA, 17 nt, Homo sapiens
aaaaggugguauguaau

SEQ ID NO: 8030 - RNA, 17 nt, Homo sapiens
ggugguauguaauuuau

SEQ ID NO: 8031 - RNA, 17 nt, Homo sapiens
gguauguaauuuaugca

SEQ ID NO: 8032 - RNA, 17 nt, Homo sapiens
uaauuuaugcaagguau

SEQ ID NO: 8033 - RNA, 17 nt, Homo sapiens
uaugcaagguauuucuc

SEQ ID NO: 8034 - RNA, 17 nt, Homo sapiens
uuucuccaguugggacu

SEQ ID NO: 8035 - RNA, 17 nt, Homo sapiens
caguugggacucaggau

SEQ ID NO: 8036 - RNA, 17 nt, Homo sapiens
gacucaggauauuaguu

SEQ ID NO: 8037 - RNA, 17 nt, Homo sapiens
ggauauuaguuaaugag

SEQ ID NO: 8038 - RNA, 17 nt, Homo sapiens
auuaguuaaugagccau

SEQ ID NO: 8039 - RNA, 17 nt, Homo sapiens
guuaaugagccaucacu

SEQ ID NO: 8040 - RNA, 17 nt, Homo sapiens
gaagaaaagcccauuuu

SEQ ID NO: 8041 - RNA, 17 nt, Homo sapiens
cauuuucaacugcuuug

SEQ ID NO: 8042 - RNA, 17 nt, Homo sapiens
uuucaacugcuuugaaa

SEQ ID NO: 8043 - RNA, 17 nt, Homo sapiens
gcuuugaaacuugccug

SEQ ID NO: 8044 - RNA, 17 nt, Homo sapiens
ugaaacuugccuggggu

SEQ ID NO: 8045 - RNA, 17 nt, Homo sapiens
ugccuggggucugagca

SEQ ID NO: 8046 - RNA, 17 nt, Homo sapiens
gggucugagcaugaugg

SEQ ID NO: 8047 - RNA, 17 nt, Homo sapiens
ugagcaugaugggaaua

SEQ ID NO: 8048 - RNA, 17 nt, Homo sapiens
ugaugggaauagggaga

SEQ ID NO: 8049 - RNA, 17 nt, Homo sapiens
auagggagacaggguag

SEQ ID NO: 8050 - RNA, 17 nt, Homo sapiens
gagacaggguaggaaag

SEQ ID NO: 8051 - RNA, 17 nt, Homo sapiens
aggaaagggcgccuacu

SEQ ID NO: 8052 - RNA, 17 nt, Homo sapiens
gaaagggcgccuacucu

SEQ ID NO: 8053 - RNA, 17 nt, Homo sapiens
ucuucagggucuaaaga

SEQ ID NO: 8054 - RNA, 17 nt, Homo sapiens
gucuaaagaucaagugg

SEQ ID NO: 8055 - RNA, 17 nt, Homo sapiens
aagaucaagugggccuu

SEQ ID NO: 8056 - RNA, 17 nt, Homo sapiens
ucaagugggccuuggau

SEQ ID NO: 8057 - RNA, 17 nt, Homo sapiens
ggccuuggaucgcuaag

SEQ ID NO: 8058 - RNA, 17 nt, Homo sapiens
cuuggaucgcuaagcug

SEQ ID NO: 8059 - RNA, 17 nt, Homo sapiens
aucgcuaagcuggcucu

SEQ ID NO: 8060 - RNA, 17 nt, Homo sapiens
cuaagcuggcucuguuu

SEQ ID NO: 8061 - RNA, 17 nt, Homo sapiens
cuggcucuguuugaugc

SEQ ID NO: 8062 - RNA, 17 nt, Homo sapiens
ucuguuugaugcuauuu

SEQ ID NO: 8063 - RNA, 17 nt, Homo sapiens
uguuugaugcuauuuau

SEQ ID NO: 8064 - RNA, 17 nt, Homo sapiens
cuauuuaugcaaguuag

SEQ ID NO: 8065 - RNA, 17 nt, Homo sapiens
uuaugcaaguuaggguc

SEQ ID NO: 8066 - RNA, 17 nt, Homo sapiens
aaguuagggucuaugua

SEQ ID NO: 8067 - RNA, 17 nt, Homo sapiens
gggucuauguauuuagg

SEQ ID NO: 8068 - RNA, 17 nt, Homo sapiens
uauuuaggaugcgccua

SEQ ID NO: 8069 - RNA, 17 nt, Homo sapiens
uuuaggaugcgccuacu

SEQ ID NO: 8070 - RNA, 17 nt, Homo sapiens
uaggaugcgccuacucu

SEQ ID NO: 8071 - RNA, 17 nt, Homo sapiens
uauuuaggaugucugca

SEQ ID NO: 8072 - RNA, 17 nt, Homo sapiens
uuuaggaugucugcacc

SEQ ID NO: 8073 - RNA, 17 nt, Homo sapiens
ggaugucugcaccuucu

SEQ ID NO: 8074 - RNA, 17 nt, Homo sapiens
caccuucugcagccagu

SEQ ID NO: 8075 - RNA, 17 nt, Homo sapiens
cuucugcagccagucag

SEQ ID NO: 8076 - RNA, 17 nt, Homo sapiens
ugcagccagucagaagc

SEQ ID NO: 8077 - RNA, 17 nt, Homo sapiens
agucagaagcuggagag

SEQ ID NO: 8078 - RNA, 17 nt, Homo sapiens
cuggagaggcaacagug

SEQ ID NO: 8079 - RNA, 17 nt, Homo sapiens
gagaggcaacaguggau

SEQ ID NO: 8080 - RNA, 17 nt, Homo sapiens
aggcaacaguggauugc

SEQ ID NO: 8081 - RNA, 17 nt, Homo sapiens
aacaguggauugcugcu

SEQ ID NO: 8082 - RNA, 17 nt, Homo sapiens
aguggauugcugcuucu

SEQ ID NO: 8083 - RNA, 17 nt, Homo sapiens
ggauugcugcuucuugg

SEQ ID NO: 8084 - RNA, 17 nt, Homo sapiens
ggagaagaguaugcuuc

SEQ ID NO: 8085 - RNA, 17 nt, Homo sapiens
aagaguaugcuuccuuu

SEQ ID NO: 8086 - RNA, 17 nt, Homo sapiens
uuauccauguaauuuaa

SEQ ID NO: 8087 - RNA, 17 nt, Homo sapiens
uccauguaauuuaacug

SEQ ID NO: 8088 - RNA, 17 nt, Homo sapiens
guaauuuaacuguagaa

SEQ ID NO: 8089 - RNA, 17 nt, Homo sapiens
auuuaacuguagaaccu

SEQ ID NO: 8090 - RNA, 17 nt, Homo sapiens
acuguagaaccugagcu

SEQ ID NO: 8091 - RNA, 17 nt, Homo sapiens
gaaccugagcucuaagu

SEQ ID NO: 8092 - RNA, 17 nt, Homo sapiens
agcucuaaguaaccgaa

SEQ ID NO: 8093 - RNA, 17 nt, Homo sapiens
ucuaaguaaccgaagaa

SEQ ID NO: 8094 - RNA, 17 nt, Homo sapiens
accgaagaauguaugcc

SEQ ID NO: 8095 - RNA, 17 nt, Homo sapiens
cgaagaauguaugccuc

SEQ ID NO: 8096 - RNA, 17 nt, Homo sapiens
gaauguaugccucuguu

SEQ ID NO: 8097 - RNA, 17 nt, Homo sapiens
augccucuguucuuaug

SEQ ID NO: 8098 - RNA, 17 nt, Homo sapiens
guucuuaugugccacau

SEQ ID NO: 8099 - RNA, 17 nt, Homo sapiens
ucuuaugugccacaucc

SEQ ID NO: 8100 - RNA, 17 nt, Homo sapiens
acauccuuguuuaaagg

SEQ ID NO: 8101 - RNA, 17 nt, Homo sapiens
guuuaaaggcucucugu

SEQ ID NO: 8102 - RNA, 17 nt, Homo sapiens
ggcucucuguaugaaga

SEQ ID NO: 8103 - RNA, 17 nt, Homo sapiens
augaagagaugggaccg

SEQ ID NO: 8104 - RNA, 17 nt, Homo sapiens
gagaugggaccgucauc

SEQ ID NO: 8105 - RNA, 17 nt, Homo sapiens
augggaccgucaucagc

SEQ ID NO: 8106 - RNA, 17 nt, Homo sapiens
cgucaucagcacauucc

SEQ ID NO: 8107 - RNA, 17 nt, Homo sapiens
auucccuagugagccua

SEQ ID NO: 8108 - RNA, 17 nt, Homo sapiens
ccuagugagccuacugg

SEQ ID NO: 8109 - RNA, 17 nt, Homo sapiens
gccuacuggcuccuggc

SEQ ID NO: 8110 - RNA, 17 nt, Homo sapiens
ggcuccuggcagcggcu

SEQ ID NO: 8111 - RNA, 17 nt, Homo sapiens
uccuggcagcggcuuuu

SEQ ID NO: 8112 - RNA, 17 nt, Homo sapiens
uggcagcggcuuuugug

SEQ ID NO: 8113 - RNA, 17 nt, Homo sapiens
cggcuuuuguggaagac

SEQ ID NO: 8114 - RNA, 17 nt, Homo sapiens
uguggaagacucacuag

SEQ ID NO: 8115 - RNA, 17 nt, Homo sapiens
acucacuagccagaaga

SEQ ID NO: 8116 - RNA, 17 nt, Homo sapiens
agagaggagugggacag

SEQ ID NO: 8117 - RNA, 17 nt, Homo sapiens
ggagugggacaguccuc

SEQ ID NO: 8118 - RNA, 17 nt, Homo sapiens
gugggacaguccucucc

SEQ ID NO: 8119 - RNA, 17 nt, Homo sapiens
ccaccaagaucuaaauc

SEQ ID NO: 8120 - RNA, 17 nt, Homo sapiens
agaucuaaauccaaaca

SEQ ID NO: 8121 - RNA, 17 nt, Homo sapiens
aaauccaaacaaaagca

SEQ ID NO: 8122 - RNA, 17 nt, Homo sapiens
aaacaaaagcaggcuag

SEQ ID NO: 8123 - RNA, 17 nt, Homo sapiens
aaaagcaggcuagagcc

SEQ ID NO: 8124 - RNA, 17 nt, Homo sapiens
aggcuagagccagaaga

SEQ ID NO: 8125 - RNA, 17 nt, Homo sapiens
aagagaggacaaaucuu

SEQ ID NO: 8126 - RNA, 17 nt, Homo sapiens
gaggacaaaucuuuguu

SEQ ID NO: 8127 - RNA, 17 nt, Homo sapiens
aaaucuuuguuguuccu

SEQ ID NO: 8128 - RNA, 17 nt, Homo sapiens
ucuuuguuguuccucuu

SEQ ID NO: 8129 - RNA, 17 nt, Homo sapiens
acacauacgcaaaccac

SEQ ID NO: 8130 - RNA, 17 nt, Homo sapiens
auacgcaaaccaccugu

SEQ ID NO: 8131 - RNA, 17 nt, Homo sapiens
aaccaccugugacagcu

SEQ ID NO: 8132 - RNA, 17 nt, Homo sapiens
caccugugacagcuggc

SEQ ID NO: 8133 - RNA, 17 nt, Homo sapiens
cugugacagcuggcaau

SEQ ID NO: 8134 - RNA, 17 nt, Homo sapiens
gacagcuggcaauuuua

SEQ ID NO: 8135 - RNA, 17 nt, Homo sapiens
agcuggcaauuuuauaa

SEQ ID NO: 8136 - RNA, 17 nt, Homo sapiens
uuuuauaaaucagguaa

SEQ ID NO: 8137 - RNA, 17 nt, Homo sapiens
uaaaucagguaacugga

SEQ ID NO: 8138 - RNA, 17 nt, Homo sapiens
aucagguaacuggaagg

SEQ ID NO: 8139 - RNA, 17 nt, Homo sapiens
ggaaggagguuaaacuc

SEQ ID NO: 8140 - RNA, 17 nt, Homo sapiens
gagguuaaacucagaaa

SEQ ID NO: 8141 - RNA, 17 nt, Homo sapiens
aaaagaagaccucaguc

SEQ ID NO: 8142 - RNA, 17 nt, Homo sapiens
agaccucagucaauucu

SEQ ID NO: 8143 - RNA, 17 nt, Homo sapiens
cucagucaauucucuac

SEQ ID NO: 8144 - RNA, 17 nt, Homo sapiens
uuuuccaaaucagauaa

SEQ ID NO: 8145 - RNA, 17 nt, Homo sapiens
caaaucagauaauagcc

SEQ ID NO: 8146 - RNA, 17 nt, Homo sapiens
aucagauaauagcccag

SEQ ID NO: 8147 - RNA, 17 nt, Homo sapiens
agauaauagcccagcaa

SEQ ID NO: 8148 - RNA, 17 nt, Homo sapiens
auagcccagcaaauagu

SEQ ID NO: 8149 - RNA, 17 nt, Homo sapiens
cccagcaaauagugaua

SEQ ID NO: 8150 - RNA, 17 nt, Homo sapiens
agcaaauagugauaaca

SEQ ID NO: 8151 - RNA, 17 nt, Homo sapiens
aaauagugauaacaaau

SEQ ID NO: 8152 - RNA, 17 nt, Homo sapiens
uagugauaacaaauaaa

SEQ ID NO: 8153 - RNA, 17 nt, Homo sapiens
gauaacaaauaaaaccu

SEQ ID NO: 8154 - RNA, 17 nt, Homo sapiens
caaauaaaaccuuagcu

SEQ ID NO: 8155 - RNA, 17 nt, Homo sapiens
aaaccuuagcuguucau

SEQ ID NO: 8156 - RNA, 17 nt, Homo sapiens
ccuuagcuguucauguc

SEQ ID NO: 8157 - RNA, 17 nt, Homo sapiens
cuguucaugucuugauu

SEQ ID NO: 8158 - RNA, 17 nt, Homo sapiens
augucuugauuucaaua

SEQ ID NO: 8159 - RNA, 17 nt, Homo sapiens
ugauuucaauaauuaau

SEQ ID NO: 8160 - RNA, 17 nt, Homo sapiens
uuucaauaauuaauucu

SEQ ID NO: 8161 - RNA, 17 nt, Homo sapiens
aauaauuaauucuuaau

SEQ ID NO: 8162 - RNA, 17 nt, Homo sapiens
aauucuuaaucauuaag

SEQ ID NO: 8163 - RNA, 17 nt, Homo sapiens
auuaagagaccauaaua

SEQ ID NO: 8164 - RNA, 17 nt, Homo sapiens
agaccauaauaaauacu

SEQ ID NO: 8165 - RNA, 17 nt, Homo sapiens
cauaauaaauacuccuu

SEQ ID NO: 8166 - RNA, 17 nt, Homo sapiens
agagaaaagcaaaacca

SEQ ID NO: 8167 - RNA, 17 nt, Homo sapiens
aaagcaaaaccauuaga

SEQ ID NO: 8168 - RNA, 17 nt, Homo sapiens
ccauuagaauuguuacu

SEQ ID NO: 8169 - RNA, 17 nt, Homo sapiens
uuagaauuguuacucag

SEQ ID NO: 8170 - RNA, 17 nt, Homo sapiens
guuacucagcuccuuca

SEQ ID NO: 8171 - RNA, 17 nt, Homo sapiens
uccuucaaacucagguu

SEQ ID NO: 8172 - RNA, 17 nt, Homo sapiens
aaacucagguuuguagc

SEQ ID NO: 8173 - RNA, 17 nt, Homo sapiens
ucagguuuguagcauac

SEQ ID NO: 8174 - RNA, 17 nt, Homo sapiens
gguuuguagcauacaug

SEQ ID NO: 8175 - RNA, 17 nt, Homo sapiens
auacaugaguccaucca

SEQ ID NO: 8176 - RNA, 17 nt, Homo sapiens
auccaucagucaaagaa

SEQ ID NO: 8177 - RNA, 17 nt, Homo sapiens
gucaaagaaugguucca

SEQ ID NO: 8178 - RNA, 17 nt, Homo sapiens
aaagaaugguuccaucu

SEQ ID NO: 8179 - RNA, 17 nt, Homo sapiens
caucuggagucuuaaug

SEQ ID NO: 8180 - RNA, 17 nt, Homo sapiens
gagucuuaauguagaaa

SEQ ID NO: 8181 - RNA, 17 nt, Homo sapiens
gucuuaauguagaaaga

SEQ ID NO: 8182 - RNA, 17 nt, Homo sapiens
aaagaaaaauggagacu

SEQ ID NO: 8183 - RNA, 17 nt, Homo sapiens
aaauggagacuuguaau

SEQ ID NO: 8184 - RNA, 17 nt, Homo sapiens
ggagacuuguaauaaug

SEQ ID NO: 8185 - RNA, 17 nt, Homo sapiens
gacuuguaauaaugagc

SEQ ID NO: 8186 - RNA, 17 nt, Homo sapiens
uuguaauaaugagcuag

SEQ ID NO: 8187 - RNA, 17 nt, Homo sapiens
aauaaugagcuaguuac

SEQ ID NO: 8188 - RNA, 17 nt, Homo sapiens
augagcuaguuacaaag

SEQ ID NO: 8189 - RNA, 17 nt, Homo sapiens
guuacaaagugcuuguu

SEQ ID NO: 8190 - RNA, 17 nt, Homo sapiens
uacaaagugcuuguuca

SEQ ID NO: 8191 - RNA, 17 nt, Homo sapiens
aagugcuuguucauuaa

SEQ ID NO: 8192 - RNA, 17 nt, Homo sapiens
ucauuaaaauagcacug

SEQ ID NO: 8193 - RNA, 17 nt, Homo sapiens
uuaaaauagcacugaaa

SEQ ID NO: 8194 - RNA, 17 nt, Homo sapiens
cacugaaaauugaaaca

SEQ ID NO: 8195 - RNA, 17 nt, Homo sapiens
aaauugaaacaugaauu

SEQ ID NO: 8196 - RNA, 17 nt, Homo sapiens
aaacaugaauuaacuga

SEQ ID NO: 8197 - RNA, 17 nt, Homo sapiens
augaauuaacugauaau

SEQ ID NO: 8198 - RNA, 17 nt, Homo sapiens
auuaacugauaauauuc

SEQ ID NO: 8199 - RNA, 17 nt, Homo sapiens
aacugauaauauuccaa

SEQ ID NO: 8200 - RNA, 17 nt, Homo sapiens
auauuccaaucauuugc

SEQ ID NO: 8201 - RNA, 17 nt, Homo sapiens
aaucauuugccauuuau

SEQ ID NO: 8202 - RNA, 17 nt, Homo sapiens
cauuuaugacaaaaaug

SEQ ID NO: 8203 - RNA, 17 nt, Homo sapiens
ugacaaaaaugguuggc

SEQ ID NO: 8204 - RNA, 17 nt, Homo sapiens
caaaaaugguuggcacu

SEQ ID NO: 8205 - RNA, 17 nt, Homo sapiens
aaugguuggcacuaaca

SEQ ID NO: 8206 - RNA, 17 nt, Homo sapiens
uggcacuaacaaagaac

SEQ ID NO: 8207 - RNA, 17 nt, Homo sapiens
aacaaagaacgagcacu

SEQ ID NO: 8208 - RNA, 17 nt, Homo sapiens
aagaacgagcacuuccu

SEQ ID NO: 8209 - RNA, 17 nt, Homo sapiens
cuuucagaguuucugag

SEQ ID NO: 8210 - RNA, 17 nt, Homo sapiens
uuucugagauaauguac

SEQ ID NO: 8211 - RNA, 17 nt, Homo sapiens
cugagauaauguacgug

SEQ ID NO: 8212 - RNA, 17 nt, Homo sapiens
gagauaauguacgugga

SEQ ID NO: 8213 - RNA, 17 nt, Homo sapiens
uaauguacguggaacag

SEQ ID NO: 8214 - RNA, 17 nt, Homo sapiens
uacguggaacagucugg

SEQ ID NO: 8215 - RNA, 17 nt, Homo sapiens
guggaacagucugggug

SEQ ID NO: 8216 - RNA, 17 nt, Homo sapiens
cagucuggguggaaugg

SEQ ID NO: 8217 - RNA, 17 nt, Homo sapiens
uggguggaauggggcug

SEQ ID NO: 8218 - RNA, 17 nt, Homo sapiens
ggaauggggcugaaacc

SEQ ID NO: 8219 - RNA, 17 nt, Homo sapiens
gggcugaaaccaugugc

SEQ ID NO: 8220 - RNA, 17 nt, Homo sapiens
gaaaccaugugcaaguc

SEQ ID NO: 8221 - RNA, 17 nt, Homo sapiens
aaccaugugcaagucug

SEQ ID NO: 8222 - RNA, 17 nt, Homo sapiens
augugcaagucuguguc

SEQ ID NO: 8223 - RNA, 17 nt, Homo sapiens
gcaagucugugucuugu

SEQ ID NO: 8224 - RNA, 17 nt, Homo sapiens
aagucugugucuuguca

SEQ ID NO: 8225 - RNA, 17 nt, Homo sapiens
ugugucuugucagucca

SEQ ID NO: 8226 - RNA, 17 nt, Homo sapiens
ucuugucaguccaagaa

SEQ ID NO: 8227 - RNA, 17 nt, Homo sapiens
uccaagaagugacaccg

SEQ ID NO: 8228 - RNA, 17 nt, Homo sapiens
aagaagugacaccgaga

SEQ ID NO: 8229 - RNA, 17 nt, Homo sapiens
acaccgagauguuaauu

SEQ ID NO: 8230 - RNA, 17 nt, Homo sapiens
accgagauguuaauuuu

SEQ ID NO: 8231 - RNA, 17 nt, Homo sapiens
agauguuaauuuuaggg

SEQ ID NO: 8232 - RNA, 17 nt, Homo sapiens
uuuuagggacccgugcc

SEQ ID NO: 8233 - RNA, 17 nt, Homo sapiens
agggacccgugccuugu

SEQ ID NO: 8234 - RNA, 17 nt, Homo sapiens
ggacccgugccuuguuu

SEQ ID NO: 8235 - RNA, 17 nt, Homo sapiens
cgugccuuguuuccuag

SEQ ID NO: 8236 - RNA, 17 nt, Homo sapiens
guuuccuagcccacaag

SEQ ID NO: 8237 - RNA, 17 nt, Homo sapiens
ccacaagaaugcaaaca

SEQ ID NO: 8238 - RNA, 17 nt, Homo sapiens
acaagaaugcaaacauc

SEQ ID NO: 8239 - RNA, 17 nt, Homo sapiens
gaaugcaaacaucaaac

SEQ ID NO: 8240 - RNA, 17 nt, Homo sapiens
aacaucaaacagauacu

SEQ ID NO: 8241 - RNA, 17 nt, Homo sapiens
ucaaacagauacucgcu

SEQ ID NO: 8242 - RNA, 17 nt, Homo sapiens
agauacucgcuagccuc

SEQ ID NO: 8243 - RNA, 17 nt, Homo sapiens
acucgcuagccucauuu

SEQ ID NO: 8244 - RNA, 17 nt, Homo sapiens
ucauuuaaauugauuaa

SEQ ID NO: 8245 - RNA, 17 nt, Homo sapiens
uuaaauugauuaaagga

SEQ ID NO: 8246 - RNA, 17 nt, Homo sapiens
aaggaggagugcaucuu

SEQ ID NO: 8247 - RNA, 17 nt, Homo sapiens
ggaggagugcaucuuug

SEQ ID NO: 8248 - RNA, 17 nt, Homo sapiens
caucuuuggccgacagu

SEQ ID NO: 8249 - RNA, 17 nt, Homo sapiens
uuuggccgacaguggug

SEQ ID NO: 8250 - RNA, 17 nt, Homo sapiens
ggccgacagugguguaa

SEQ ID NO: 8251 - RNA, 17 nt, Homo sapiens
cgacagugguguaacug

SEQ ID NO: 8252 - RNA, 17 nt, Homo sapiens
acagugguguaacugug

SEQ ID NO: 8253 - RNA, 17 nt, Homo sapiens
gugguguaacugugugu

SEQ ID NO: 8254 - RNA, 17 nt, Homo sapiens
guguaacugugugugug

SEQ ID NO: 8255 - RNA, 17 nt, Homo sapiens
guaacugugugugugug

SEQ ID NO: 8256 - RNA, 17 nt, Homo sapiens
aacugugugugugugug

SEQ ID NO: 8257 - RNA, 17 nt, Homo sapiens
cugugugugugugugug

SEQ ID NO: 8258 - RNA, 17 nt, Homo sapiens
gugugugugugugugug

SEQ ID NO: 8259 - RNA, 17 nt, Homo sapiens
guguguguguguguggg

SEQ ID NO: 8260 - RNA, 17 nt, Homo sapiens
gugugugugugugggug

SEQ ID NO: 8261 - RNA, 17 nt, Homo sapiens
gugugugugugggugug

SEQ ID NO: 8262 - RNA, 17 nt, Homo sapiens
gugugugggugugggug

SEQ ID NO: 8263 - RNA, 17 nt, Homo sapiens
gugugggugugggugua

SEQ ID NO: 8264 - RNA, 17 nt, Homo sapiens
ggguguggguguaugug

SEQ ID NO: 8265 - RNA, 17 nt, Homo sapiens
guguggguguaugugug

SEQ ID NO: 8266 - RNA, 17 nt, Homo sapiens
ggguguauguguguuuu

SEQ ID NO: 8267 - RNA, 17 nt, Homo sapiens
guguauguguguuuugu

SEQ ID NO: 8268 - RNA, 17 nt, Homo sapiens
guauguguguuuugugc

SEQ ID NO: 8269 - RNA, 17 nt, Homo sapiens
uguguuuugugcauaac

SEQ ID NO: 8270 - RNA, 17 nt, Homo sapiens
uguuuugugcauaacua

SEQ ID NO: 8271 - RNA, 17 nt, Homo sapiens
ugugcauaacuauuuaa

SEQ ID NO: 8272 - RNA, 17 nt, Homo sapiens
uuaaggaaacuggaauu

SEQ ID NO: 8273 - RNA, 17 nt, Homo sapiens
aaacuggaauuuuaaag

SEQ ID NO: 8274 - RNA, 17 nt, Homo sapiens
auuuuaaaguuacuuuu

SEQ ID NO: 8275 - RNA, 17 nt, Homo sapiens
uuauacaaaccaagaau

SEQ ID NO: 8276 - RNA, 17 nt, Homo sapiens
aaccaagaauauaugcu

SEQ ID NO: 8277 - RNA, 17 nt, Homo sapiens
gaauauaugcuacagau

SEQ ID NO: 8278 - RNA, 17 nt, Homo sapiens
ugcuacagauauaagac

SEQ ID NO: 8279 - RNA, 17 nt, Homo sapiens
gauauaagacagacaug

SEQ ID NO: 8280 - RNA, 17 nt, Homo sapiens
uaagacagacaugguuu

SEQ ID NO: 8281 - RNA, 17 nt, Homo sapiens
cagacaugguuuggucc

SEQ ID NO: 8282 - RNA, 17 nt, Homo sapiens
augguuugguccuauau

SEQ ID NO: 8283 - RNA, 17 nt, Homo sapiens
uauuucuagucaugaug

SEQ ID NO: 8284 - RNA, 17 nt, Homo sapiens
uagucaugaugaaugua

SEQ ID NO: 8285 - RNA, 17 nt, Homo sapiens
caugaugaauguauuuu

SEQ ID NO: 8286 - RNA, 17 nt, Homo sapiens
ugaugaauguauuuugu

SEQ ID NO: 8287 - RNA, 17 nt, Homo sapiens
uguauuuuguauaccau

SEQ ID NO: 8288 - RNA, 17 nt, Homo sapiens
uucauauaauauacuua

SEQ ID NO: 8289 - RNA, 17 nt, Homo sapiens
acuuaaaaauauuucuu

SEQ ID NO: 8290 - RNA, 17 nt, Homo sapiens
auuucuuaauugggauu

SEQ ID NO: 8291 - RNA, 17 nt, Homo sapiens
uaauugggauuuguaau

SEQ ID NO: 8292 - RNA, 17 nt, Homo sapiens
ugggauuuguaaucgua

SEQ ID NO: 8293 - RNA, 17 nt, Homo sapiens
gauuuguaaucguacca

SEQ ID NO: 8294 - RNA, 17 nt, Homo sapiens
uuguaaucguaccaacu

SEQ ID NO: 8295 - RNA, 17 nt, Homo sapiens
ucguaccaacuuaauug

SEQ ID NO: 8296 - RNA, 17 nt, Homo sapiens
ccaacuuaauugauaaa

SEQ ID NO: 8297 - RNA, 17 nt, Homo sapiens
cuuaauugauaaacuug

SEQ ID NO: 8298 - RNA, 17 nt, Homo sapiens
auugauaaacuuggcaa

SEQ ID NO: 8299 - RNA, 17 nt, Homo sapiens
uaaacuuggcaacugcu

SEQ ID NO: 8300 - RNA, 17 nt, Homo sapiens
acuuggcaacugcuuuu

SEQ ID NO: 8301 - RNA, 17 nt, Homo sapiens
uggcaacugcuuuuaug

SEQ ID NO: 8302 - RNA, 17 nt, Homo sapiens
gcuuuuauguucugucu

SEQ ID NO: 8303 - RNA, 17 nt, Homo sapiens
uauguucugucuccuuc

SEQ ID NO: 8304 - RNA, 17 nt, Homo sapiens
uuccauaaauuuuucaa

SEQ ID NO: 8305 - RNA, 17 nt, Homo sapiens
uuuucaaaauacuaauu

SEQ ID NO: 8306 - RNA, 17 nt, Homo sapiens
aaauacuaauucaacaa

SEQ ID NO: 8307 - RNA, 17 nt, Homo sapiens
cuaauucaacaaagaaa

SEQ ID NO: 8308 - RNA, 17 nt, Homo sapiens
aagaaaaagcucuuuuu

SEQ ID NO: 8309 - RNA, 17 nt, Homo sapiens
uuccuaaaauaaacuca

SEQ ID NO: 8310 - RNA, 17 nt, Homo sapiens
uaaaauaaacucaaauu

SEQ ID NO: 8311 - RNA, 17 nt, Homo sapiens
aaacucaaauuuauccu

SEQ ID NO: 8312 - RNA, 17 nt, Homo sapiens
uuauccuuguuuagagc

SEQ ID NO: 8313 - RNA, 17 nt, Homo sapiens
uguuuagagcagagaaa

SEQ ID NO: 8314 - RNA, 17 nt, Homo sapiens
agagaaaaauuaagaaa

SEQ ID NO: 8315 - RNA, 17 nt, Homo sapiens
uaagaaaaacuuugaaa

SEQ ID NO: 8316 - RNA, 17 nt, Homo sapiens
acuuugaaauggucuca

SEQ ID NO: 8317 - RNA, 17 nt, Homo sapiens
uugaaauggucucaaaa

SEQ ID NO: 8318 - RNA, 17 nt, Homo sapiens
cucaaaaaauugcuaaa

SEQ ID NO: 8319 - RNA, 17 nt, Homo sapiens
aaaaaauugcuaaauau

SEQ ID NO: 8320 - RNA, 17 nt, Homo sapiens
auugcuaaauauuuuca

SEQ ID NO: 8321 - RNA, 17 nt, Homo sapiens
uauuuucaauggaaaac

SEQ ID NO: 8322 - RNA, 17 nt, Homo sapiens
aauggaaaacuaaaugu

SEQ ID NO: 8323 - RNA, 17 nt, Homo sapiens
aaaacuaaauguuaguu

SEQ ID NO: 8324 - RNA, 17 nt, Homo sapiens
aacuaaauguuaguuua

SEQ ID NO: 8325 - RNA, 17 nt, Homo sapiens
aaauguuaguuuagcug

SEQ ID NO: 8326 - RNA, 17 nt, Homo sapiens
uuaguuuagcugauugu

SEQ ID NO: 8327 - RNA, 17 nt, Homo sapiens
uuuagcugauuguaugg

SEQ ID NO: 8328 - RNA, 17 nt, Homo sapiens
agcugauuguauggggu

SEQ ID NO: 8329 - RNA, 17 nt, Homo sapiens
uguaugggguuuucgaa

SEQ ID NO: 8330 - RNA, 17 nt, Homo sapiens
guuuucgaaccuuucac

SEQ ID NO: 8331 - RNA, 17 nt, Homo sapiens
cacuuuuuguuuguuuu

SEQ ID NO: 8332 - RNA, 17 nt, Homo sapiens
uuuuguuuguuuuaccu

SEQ ID NO: 8333 - RNA, 17 nt, Homo sapiens
auuucacaacuguguaa

SEQ ID NO: 8334 - RNA, 17 nt, Homo sapiens
ucacaacuguguaaauu

SEQ ID NO: 8335 - RNA, 17 nt, Homo sapiens
acaacuguguaaauugc

SEQ ID NO: 8336 - RNA, 17 nt, Homo sapiens
cuguguaaauugccaau

SEQ ID NO: 8337 - RNA, 17 nt, Homo sapiens
uguaaauugccaauaau

SEQ ID NO: 8338 - RNA, 17 nt, Homo sapiens
aauugccaauaauuccu

SEQ ID NO: 8339 - RNA, 17 nt, Homo sapiens
ugccaauaauuccuguc

SEQ ID NO: 8340 - RNA, 17 nt, Homo sapiens
uaauuccuguccaugaa

SEQ ID NO: 8341 - RNA, 17 nt, Homo sapiens
ccaugaaaaugcaaauu

SEQ ID NO: 8342 - RNA, 17 nt, Homo sapiens
augaaaaugcaaauuau

SEQ ID NO: 8343 - RNA, 17 nt, Homo sapiens
aaaugcaaauuauccag

SEQ ID NO: 8344 - RNA, 17 nt, Homo sapiens
auuauccaguguagaua

SEQ ID NO: 8345 - RNA, 17 nt, Homo sapiens
uauccaguguagauaua

SEQ ID NO: 8346 - RNA, 17 nt, Homo sapiens
caguguagauauauuug

SEQ ID NO: 8347 - RNA, 17 nt, Homo sapiens
uauauuugaccaucacc

SEQ ID NO: 8348 - RNA, 17 nt, Homo sapiens
cccuauggauauuggcu

SEQ ID NO: 8349 - RNA, 17 nt, Homo sapiens
ggauauuggcuaguuuu

SEQ ID NO: 8350 - RNA, 17 nt, Homo sapiens
auuggcuaguuuugccu

SEQ ID NO: 8351 - RNA, 17 nt, Homo sapiens
cuaguuuugccuuuauu

SEQ ID NO: 8352 - RNA, 17 nt, Homo sapiens
uuuauuaagcaaauuca

SEQ ID NO: 8353 - RNA, 17 nt, Homo sapiens
uuaagcaaauucauuuc

SEQ ID NO: 8354 - RNA, 17 nt, Homo sapiens
ucauuucagccugaaug

SEQ ID NO: 8355 - RNA, 17 nt, Homo sapiens
cagccugaaugucugcc

SEQ ID NO: 8356 - RNA, 17 nt, Homo sapiens
gccugaaugucugccua

SEQ ID NO: 8357 - RNA, 17 nt, Homo sapiens
gaaugucugccuauaua

SEQ ID NO: 8358 - RNA, 17 nt, Homo sapiens
uauucucugcucuuugu

SEQ ID NO: 8359 - RNA, 17 nt, Homo sapiens
ugcucuuuguauucucc

SEQ ID NO: 8360 - RNA, 17 nt, Homo sapiens
uccuuugaacccguuaa

SEQ ID NO: 8361 - RNA, 17 nt, Homo sapiens
uugaacccguuaaaaca

SEQ ID NO: 8362 - RNA, 17 nt, Homo sapiens
ccguuaaaacauccugu

SEQ ID NO: 8363 - RNA, 17 nt, Homo sapiens
aacauccuguggcacuc

SEQ ID NO: 8364 - RNA, 17 nt, Homo sapiens
gucccgggaccccggga

SEQ ID NO: 8365 - RNA, 17 nt, Homo sapiens
ccgggagagcggucagu

SEQ ID NO: 8366 - RNA, 17 nt, Homo sapiens
ggagagcggucagugug

SEQ ID NO: 8367 - RNA, 17 nt, Homo sapiens
agcggucaguguguggu

SEQ ID NO: 8368 - RNA, 17 nt, Homo sapiens
cggucaguguguggucg

SEQ ID NO: 8369 - RNA, 17 nt, Homo sapiens
gucaguguguggucgcu

SEQ ID NO: 8370 - RNA, 17 nt, Homo sapiens
aguguguggucgcugcg

SEQ ID NO: 8371 - RNA, 17 nt, Homo sapiens
guguggucgcugcguuu

SEQ ID NO: 8372 - RNA, 17 nt, Homo sapiens
uggucgcugcguuuccu

SEQ ID NO: 8373 - RNA, 17 nt, Homo sapiens
gucgcugcguuuccucu

SEQ ID NO: 8374 - RNA, 17 nt, Homo sapiens
uuuccucugccugcgcc

SEQ ID NO: 8375 - RNA, 17 nt, Homo sapiens
cucugccugcgccgggc

SEQ ID NO: 8376 - RNA, 17 nt, Homo sapiens
cugccugcgccgggcau

SEQ ID NO: 8377 - RNA, 17 nt, Homo sapiens
ugcgccgggcaucacuu

SEQ ID NO: 8378 - RNA, 17 nt, Homo sapiens
cgccgggcaucacuugc

SEQ ID NO: 8379 - RNA, 17 nt, Homo sapiens
cgggcaucacuugcgcg

SEQ ID NO: 8380 - RNA, 17 nt, Homo sapiens
caucacuugcgcgccgc

SEQ ID NO: 8381 - RNA, 17 nt, Homo sapiens
ucacuugcgcgccgcag

SEQ ID NO: 8382 - RNA, 17 nt, Homo sapiens
acuugcgcgccgcagaa

SEQ ID NO: 8383 - RNA, 17 nt, Homo sapiens
ugcgcgccgcagaaagu

SEQ ID NO: 8384 - RNA, 17 nt, Homo sapiens
cgcagaaaguccgucug

SEQ ID NO: 8385 - RNA, 17 nt, Homo sapiens
gaaaguccgucuggcag

SEQ ID NO: 8386 - RNA, 17 nt, Homo sapiens
uccgucuggcagccugg

SEQ ID NO: 8387 - RNA, 17 nt, Homo sapiens
gucuggcagccuggaua

SEQ ID NO: 8388 - RNA, 17 nt, Homo sapiens
cagccuggauauccucu

SEQ ID NO: 8389 - RNA, 17 nt, Homo sapiens
gccuggauauccucucc

SEQ ID NO: 8390 - RNA, 17 nt, Homo sapiens
ccucuccuaccggcacc

SEQ ID NO: 8391 - RNA, 17 nt, Homo sapiens
uccuaccggcacccgca

SEQ ID NO: 8392 - RNA, 17 nt, Homo sapiens
cuaccggcacccgcaga

SEQ ID NO: 8393 - RNA, 17 nt, Homo sapiens
cggcacccgcagacgcc

SEQ ID NO: 8394 - RNA, 17 nt, Homo sapiens
acccgcagacgccccug

SEQ ID NO: 8395 - RNA, 17 nt, Homo sapiens
ccgcagacgccccugca

SEQ ID NO: 8396 - RNA, 17 nt, Homo sapiens
acgccccugcagccgcc

SEQ ID NO: 8397 - RNA, 17 nt, Homo sapiens
ccccugcagccgccggu

SEQ ID NO: 8398 - RNA, 17 nt, Homo sapiens
cugcagccgccggucgg

SEQ ID NO: 8399 - RNA, 17 nt, Homo sapiens
agccgccggucggcgcc

SEQ ID NO: 8400 - RNA, 17 nt, Homo sapiens
gccggucggcgcccggg

SEQ ID NO: 8401 - RNA, 17 nt, Homo sapiens
cggucggcgcccgggcu

SEQ ID NO: 8402 - RNA, 17 nt, Homo sapiens
gcgcccgggcucccuag

SEQ ID NO: 8403 - RNA, 17 nt, Homo sapiens
gcucccuagcccugugc

SEQ ID NO: 8404 - RNA, 17 nt, Homo sapiens
cuagcccugugcgcuca

SEQ ID NO: 8405 - RNA, 17 nt, Homo sapiens
agcccugugcgcucaac

SEQ ID NO: 8406 - RNA, 17 nt, Homo sapiens
cccugugcgcucaacug

SEQ ID NO: 8407 - RNA, 17 nt, Homo sapiens
ugcgcucaacuguccug

SEQ ID NO: 8408 - RNA, 17 nt, Homo sapiens
gcucaacuguccugcgc

SEQ ID NO: 8409 - RNA, 17 nt, Homo sapiens
acuguccugcgcugcgg

SEQ ID NO: 8410 - RNA, 17 nt, Homo sapiens
uguccugcgcugcgggg

SEQ ID NO: 8411 - RNA, 17 nt, Homo sapiens
ccugcgcugcggggugc

SEQ ID NO: 8412 - RNA, 17 nt, Homo sapiens
gcugcggggugccgcga

SEQ ID NO: 8413 - RNA, 17 nt, Homo sapiens
ugcggggugccgcgagu

SEQ ID NO: 8414 - RNA, 17 nt, Homo sapiens
ggggugccgcgaguucc

SEQ ID NO: 8415 - RNA, 17 nt, Homo sapiens
ugccgcgaguuccaccu

SEQ ID NO: 8416 - RNA, 17 nt, Homo sapiens
cgaguuccaccuccgcg

SEQ ID NO: 8417 - RNA, 17 nt, Homo sapiens
ccaccuccgcgccuccu

SEQ ID NO: 8418 - RNA, 17 nt, Homo sapiens
accuccgcgccuccuuc

SEQ ID NO: 8419 - RNA, 17 nt, Homo sapiens
uucucuagacaggcgcu

SEQ ID NO: 8420 - RNA, 17 nt, Homo sapiens
cuagacaggcgcuggga

SEQ ID NO: 8421 - RNA, 17 nt, Homo sapiens
agacaggcgcugggaga

SEQ ID NO: 8422 - RNA, 17 nt, Homo sapiens
gagaaagaaccggcucc

SEQ ID NO: 8423 - RNA, 17 nt, Homo sapiens
aagaaccggcucccgag

SEQ ID NO: 8424 - RNA, 17 nt, Homo sapiens
gcucccgaguucugggc

SEQ ID NO: 8425 - RNA, 17 nt, Homo sapiens
aguucugggcauuucgc

SEQ ID NO: 8426 - RNA, 17 nt, Homo sapiens
uucugggcauuucgccc

SEQ ID NO: 8427 - RNA, 17 nt, Homo sapiens
ggcauuucgcccggcuc

SEQ ID NO: 8428 - RNA, 17 nt, Homo sapiens
uucgcccggcucgaggu

SEQ ID NO: 8429 - RNA, 17 nt, Homo sapiens
ggcucgaggugcaggau

SEQ ID NO: 8430 - RNA, 17 nt, Homo sapiens
cucgaggugcaggaugc

SEQ ID NO: 8431 - RNA, 17 nt, Homo sapiens
ggugcaggaugcagagc

SEQ ID NO: 8432 - RNA, 17 nt, Homo sapiens
ugcaggaugcagagcaa

SEQ ID NO: 8433 - RNA, 17 nt, Homo sapiens
gaugcagagcaaggugc

SEQ ID NO: 8434 - RNA, 17 nt, Homo sapiens
agagcaaggugcugcug

SEQ ID NO: 8435 - RNA, 17 nt, Homo sapiens
agcaaggugcugcuggc

SEQ ID NO: 8436 - RNA, 17 nt, Homo sapiens
aaggugcugcuggccgu

SEQ ID NO: 8437 - RNA, 17 nt, Homo sapiens
ugcugcuggccgucgcc

SEQ ID NO: 8438 - RNA, 17 nt, Homo sapiens
ugcuggccgucgcccug

SEQ ID NO: 8439 - RNA, 17 nt, Homo sapiens
uggccgucgcccugugg

SEQ ID NO: 8440 - RNA, 17 nt, Homo sapiens
gucgcccuguggcucug

SEQ ID NO: 8441 - RNA, 17 nt, Homo sapiens
gcccuguggcucugcgu

SEQ ID NO: 8442 - RNA, 17 nt, Homo sapiens
guggcucugcguggaga

SEQ ID NO: 8443 - RNA, 17 nt, Homo sapiens
ggcucugcguggagacc

SEQ ID NO: 8444 - RNA, 17 nt, Homo sapiens
gcguggagacccgggcc

SEQ ID NO: 8445 - RNA, 17 nt, Homo sapiens
agacccgggccgccucu

SEQ ID NO: 8446 - RNA, 17 nt, Homo sapiens
cccgggccgccucugug

SEQ ID NO: 8447 - RNA, 17 nt, Homo sapiens
ccgccucuguggguuug

SEQ ID NO: 8448 - RNA, 17 nt, Homo sapiens
cucuguggguuugccua

SEQ ID NO: 8449 - RNA, 17 nt, Homo sapiens
guggguuugccuagugu

SEQ ID NO: 8450 - RNA, 17 nt, Homo sapiens
uuugccuaguguuucuc

SEQ ID NO: 8451 - RNA, 17 nt, Homo sapiens
ugccuaguguuucucuu

SEQ ID NO: 8452 - RNA, 17 nt, Homo sapiens
uucucuugaucugccca

SEQ ID NO: 8453 - RNA, 17 nt, Homo sapiens
cuugaucugcccaggcu

SEQ ID NO: 8454 - RNA, 17 nt, Homo sapiens
cugcccaggcucagcau

SEQ ID NO: 8455 - RNA, 17 nt, Homo sapiens
caggcucagcauacaaa

SEQ ID NO: 8456 - RNA, 17 nt, Homo sapiens
acaaaaagacauacuua

SEQ ID NO: 8457 - RNA, 17 nt, Homo sapiens
uacuuacaauuaaggcu

SEQ ID NO: 8458 - RNA, 17 nt, Homo sapiens
caauuaaggcuaauaca

SEQ ID NO: 8459 - RNA, 17 nt, Homo sapiens
uaaggcuaauacaacuc

SEQ ID NO: 8460 - RNA, 17 nt, Homo sapiens
cuaauacaacucuucaa

SEQ ID NO: 8461 - RNA, 17 nt, Homo sapiens
cucuucaaauuacuugc

SEQ ID NO: 8462 - RNA, 17 nt, Homo sapiens
aauuacuugcaggggac

SEQ ID NO: 8463 - RNA, 17 nt, Homo sapiens
ugcaggggacagaggga

SEQ ID NO: 8464 - RNA, 17 nt, Homo sapiens
acagagggacuuggacu

SEQ ID NO: 8465 - RNA, 17 nt, Homo sapiens
ggacuuggacuggcuuu

SEQ ID NO: 8466 - RNA, 17 nt, Homo sapiens
uuggacuggcuuuggcc

SEQ ID NO: 8467 - RNA, 17 nt, Homo sapiens
uggcuuuggcccaauaa

SEQ ID NO: 8468 - RNA, 17 nt, Homo sapiens
uuggcccaauaaucaga

SEQ ID NO: 8469 - RNA, 17 nt, Homo sapiens
gcccaauaaucagagug

SEQ ID NO: 8470 - RNA, 17 nt, Homo sapiens
uaaucagaguggcagug

SEQ ID NO: 8471 - RNA, 17 nt, Homo sapiens
ucagaguggcagugagc

SEQ ID NO: 8472 - RNA, 17 nt, Homo sapiens
gaguggcagugagcaaa

SEQ ID NO: 8473 - RNA, 17 nt, Homo sapiens
ggcagugagcaaagggu

SEQ ID NO: 8474 - RNA, 17 nt, Homo sapiens
agcaaaggguggaggug

SEQ ID NO: 8475 - RNA, 17 nt, Homo sapiens
ggguggaggugacugag

SEQ ID NO: 8476 - RNA, 17 nt, Homo sapiens
uggaggugacugagugc

SEQ ID NO: 8477 - RNA, 17 nt, Homo sapiens
gugacugagugcagcga

SEQ ID NO: 8478 - RNA, 17 nt, Homo sapiens
gacugagugcagcgaug

SEQ ID NO: 8479 - RNA, 17 nt, Homo sapiens
ugagugcagcgauggcc

SEQ ID NO: 8480 - RNA, 17 nt, Homo sapiens
gugcagcgauggccucu

SEQ ID NO: 8481 - RNA, 17 nt, Homo sapiens
cagcgauggccucuucu

SEQ ID NO: 8482 - RNA, 17 nt, Homo sapiens
ccucuucuguaagacac

SEQ ID NO: 8483 - RNA, 17 nt, Homo sapiens
ucuguaagacacucaca

SEQ ID NO: 8484 - RNA, 17 nt, Homo sapiens
cacucacaauuccaaaa

SEQ ID NO: 8485 - RNA, 17 nt, Homo sapiens
uuccaaaagugaucgga

SEQ ID NO: 8486 - RNA, 17 nt, Homo sapiens
caaaagugaucggaaau

SEQ ID NO: 8487 - RNA, 17 nt, Homo sapiens
gaucggaaaugacacug

SEQ ID NO: 8488 - RNA, 17 nt, Homo sapiens
cggaaaugacacuggag

SEQ ID NO: 8489 - RNA, 17 nt, Homo sapiens
acacuggagccuacaag

SEQ ID NO: 8490 - RNA, 17 nt, Homo sapiens
gccuacaagugcuucua

SEQ ID NO: 8491 - RNA, 17 nt, Homo sapiens
cuacaagugcuucuacc

SEQ ID NO: 8492 - RNA, 17 nt, Homo sapiens
accgggaaacugacuug

SEQ ID NO: 8493 - RNA, 17 nt, Homo sapiens
ggaaacugacuuggccu

SEQ ID NO: 8494 - RNA, 17 nt, Homo sapiens
cugacuuggccucgguc

SEQ ID NO: 8495 - RNA, 17 nt, Homo sapiens
uggccucggucauuuau

SEQ ID NO: 8496 - RNA, 17 nt, Homo sapiens
ucauuuaugucuauguu

SEQ ID NO: 8497 - RNA, 17 nt, Homo sapiens
augucuauguucaagau

SEQ ID NO: 8498 - RNA, 17 nt, Homo sapiens
uguucaagauuacagau

SEQ ID NO: 8499 - RNA, 17 nt, Homo sapiens
gauuacagaucuccauu

SEQ ID NO: 8500 - RNA, 17 nt, Homo sapiens
cauuuauugcuucuguu

SEQ ID NO: 8501 - RNA, 17 nt, Homo sapiens
uugcuucuguuagugac

SEQ ID NO: 8502 - RNA, 17 nt, Homo sapiens
uucuguuagugaccaac

SEQ ID NO: 8503 - RNA, 17 nt, Homo sapiens
uguuagugaccaacaug

SEQ ID NO: 8504 - RNA, 17 nt, Homo sapiens
agugaccaacauggagu

SEQ ID NO: 8505 - RNA, 17 nt, Homo sapiens
aacauggagucguguac

SEQ ID NO: 8506 - RNA, 17 nt, Homo sapiens
auggagucguguacauu

SEQ ID NO: 8507 - RNA, 17 nt, Homo sapiens
ggagucguguacauuac

SEQ ID NO: 8508 - RNA, 17 nt, Homo sapiens
uacugagaacaaaaaca

SEQ ID NO: 8509 - RNA, 17 nt, Homo sapiens
gaacaaaaacaaaacug

SEQ ID NO: 8510 - RNA, 17 nt, Homo sapiens
aaaacaaaacuguggug

SEQ ID NO: 8511 - RNA, 17 nt, Homo sapiens
acaaaacuguggugauu

SEQ ID NO: 8512 - RNA, 17 nt, Homo sapiens
aaacuguggugauucca

SEQ ID NO: 8513 - RNA, 17 nt, Homo sapiens
cuguggugauuccaugu

SEQ ID NO: 8514 - RNA, 17 nt, Homo sapiens
gauuccaugucucgggu

SEQ ID NO: 8515 - RNA, 17 nt, Homo sapiens
ugucucggguccauuuc

SEQ ID NO: 8516 - RNA, 17 nt, Homo sapiens
cauuucaaaucucaacg

SEQ ID NO: 8517 - RNA, 17 nt, Homo sapiens
aaaucucaacgugucac

SEQ ID NO: 8518 - RNA, 17 nt, Homo sapiens
aucucaacgugucacuu

SEQ ID NO: 8519 - RNA, 17 nt, Homo sapiens
cucaacgugucacuuug

SEQ ID NO: 8520 - RNA, 17 nt, Homo sapiens
gucacuuugugcaagau

SEQ ID NO: 8521 - RNA, 17 nt, Homo sapiens
cacuuugugcaagauac

SEQ ID NO: 8522 - RNA, 17 nt, Homo sapiens
ugugcaagauacccaga

SEQ ID NO: 8523 - RNA, 17 nt, Homo sapiens
gaaaagagauuuguucc

SEQ ID NO: 8524 - RNA, 17 nt, Homo sapiens
agagauuuguuccugau

SEQ ID NO: 8525 - RNA, 17 nt, Homo sapiens
uguuccugaugguaaca

SEQ ID NO: 8526 - RNA, 17 nt, Homo sapiens
uccugaugguaacagaa

SEQ ID NO: 8527 - RNA, 17 nt, Homo sapiens
ugaugguaacagaauuu

SEQ ID NO: 8528 - RNA, 17 nt, Homo sapiens
guaacagaauuuccugg

SEQ ID NO: 8529 - RNA, 17 nt, Homo sapiens
uuccugggacagcaaga

SEQ ID NO: 8530 - RNA, 17 nt, Homo sapiens
cugggacagcaagaagg

SEQ ID NO: 8531 - RNA, 17 nt, Homo sapiens
caagaagggcuuuacua

SEQ ID NO: 8532 - RNA, 17 nt, Homo sapiens
uauucccagcuacauga

SEQ ID NO: 8533 - RNA, 17 nt, Homo sapiens
gcuacaugaucagcuau

SEQ ID NO: 8534 - RNA, 17 nt, Homo sapiens
caugaucagcuaugcug

SEQ ID NO: 8535 - RNA, 17 nt, Homo sapiens
ucagcuaugcuggcaug

SEQ ID NO: 8536 - RNA, 17 nt, Homo sapiens
cuaugcuggcauggucu

SEQ ID NO: 8537 - RNA, 17 nt, Homo sapiens
cuggcauggucuucugu

SEQ ID NO: 8538 - RNA, 17 nt, Homo sapiens
ggucuucugugaagcaa

SEQ ID NO: 8539 - RNA, 17 nt, Homo sapiens
ucugugaagcaaaaauu

SEQ ID NO: 8540 - RNA, 17 nt, Homo sapiens
aagcaaaaauuaaugau

SEQ ID NO: 8541 - RNA, 17 nt, Homo sapiens
aaaaauuaaugaugaaa

SEQ ID NO: 8542 - RNA, 17 nt, Homo sapiens
aauuaaugaugaaaguu

SEQ ID NO: 8543 - RNA, 17 nt, Homo sapiens
ugaugaaaguuaccagu

SEQ ID NO: 8544 - RNA, 17 nt, Homo sapiens
aguuaccagucuauuau

SEQ ID NO: 8545 - RNA, 17 nt, Homo sapiens
ucuauuauguacauagu

SEQ ID NO: 8546 - RNA, 17 nt, Homo sapiens
uguacauaguugucguu

SEQ ID NO: 8547 - RNA, 17 nt, Homo sapiens
acauaguugucguugua

SEQ ID NO: 8548 - RNA, 17 nt, Homo sapiens
uaguugucguuguaggg

SEQ ID NO: 8549 - RNA, 17 nt, Homo sapiens
uugucguuguaggguau

SEQ ID NO: 8550 - RNA, 17 nt, Homo sapiens
guuguaggguauaggau

SEQ ID NO: 8551 - RNA, 17 nt, Homo sapiens
gguauaggauuuaugau

SEQ ID NO: 8552 - RNA, 17 nt, Homo sapiens
gauuuaugaugugguuc

SEQ ID NO: 8553 - RNA, 17 nt, Homo sapiens
uuuaugaugugguucug

SEQ ID NO: 8554 - RNA, 17 nt, Homo sapiens
augaugugguucugagu

SEQ ID NO: 8555 - RNA, 17 nt, Homo sapiens
gguucugaguccgucuc

SEQ ID NO: 8556 - RNA, 17 nt, Homo sapiens
cugaguccgucucaugg

SEQ ID NO: 8557 - RNA, 17 nt, Homo sapiens
cucauggaauugaacua

SEQ ID NO: 8558 - RNA, 17 nt, Homo sapiens
ggaauugaacuaucugu

SEQ ID NO: 8559 - RNA, 17 nt, Homo sapiens
aacuaucuguuggagaa

SEQ ID NO: 8560 - RNA, 17 nt, Homo sapiens
ggagaaaagcuugucuu

SEQ ID NO: 8561 - RNA, 17 nt, Homo sapiens
aaaagcuugucuuaaau

SEQ ID NO: 8562 - RNA, 17 nt, Homo sapiens
ugucuuaaauuguacag

SEQ ID NO: 8563 - RNA, 17 nt, Homo sapiens
cuuaaauuguacagcaa

SEQ ID NO: 8564 - RNA, 17 nt, Homo sapiens
auuguacagcaagaacu

SEQ ID NO: 8565 - RNA, 17 nt, Homo sapiens
cagcaagaacugaacua

SEQ ID NO: 8566 - RNA, 17 nt, Homo sapiens
agaacugaacuaaaugu

SEQ ID NO: 8567 - RNA, 17 nt, Homo sapiens
ugaacuaaaugugggga

SEQ ID NO: 8568 - RNA, 17 nt, Homo sapiens
aacuaaauguggggauu

SEQ ID NO: 8569 - RNA, 17 nt, Homo sapiens
auguggggauugacuuc

SEQ ID NO: 8570 - RNA, 17 nt, Homo sapiens
ggggauugacuucaacu

SEQ ID NO: 8571 - RNA, 17 nt, Homo sapiens
ugacuucaacugggaau

SEQ ID NO: 8572 - RNA, 17 nt, Homo sapiens
aacugggaauacccuuc

SEQ ID NO: 8573 - RNA, 17 nt, Homo sapiens
ucuucgaagcaucagca

SEQ ID NO: 8574 - RNA, 17 nt, Homo sapiens
aagcaucagcauaagaa

SEQ ID NO: 8575 - RNA, 17 nt, Homo sapiens
cauaagaaacuuguaaa

SEQ ID NO: 8576 - RNA, 17 nt, Homo sapiens
agaaacuuguaaaccga

SEQ ID NO: 8577 - RNA, 17 nt, Homo sapiens
acuuguaaaccgagacc

SEQ ID NO: 8578 - RNA, 17 nt, Homo sapiens
aaaccgagaccuaaaaa

SEQ ID NO: 8579 - RNA, 17 nt, Homo sapiens
accuaaaaacccagucu

SEQ ID NO: 8580 - RNA, 17 nt, Homo sapiens
aaaacccagucugggag

SEQ ID NO: 8581 - RNA, 17 nt, Homo sapiens
gucugggagugagauga

SEQ ID NO: 8582 - RNA, 17 nt, Homo sapiens
ggagugagaugaagaaa

SEQ ID NO: 8583 - RNA, 17 nt, Homo sapiens
augaagaaauuuuugag

SEQ ID NO: 8584 - RNA, 17 nt, Homo sapiens
auuuuugagcaccuuaa

SEQ ID NO: 8585 - RNA, 17 nt, Homo sapiens
gcaccuuaacuauagau

SEQ ID NO: 8586 - RNA, 17 nt, Homo sapiens
aacuauagaugguguaa

SEQ ID NO: 8587 - RNA, 17 nt, Homo sapiens
uauagaugguguaaccc

SEQ ID NO: 8588 - RNA, 17 nt, Homo sapiens
uagaugguguaacccgg

SEQ ID NO: 8589 - RNA, 17 nt, Homo sapiens
augguguaacccggagu

SEQ ID NO: 8590 - RNA, 17 nt, Homo sapiens
aacccggagugaccaag

SEQ ID NO: 8591 - RNA, 17 nt, Homo sapiens
ccggagugaccaaggau

SEQ ID NO: 8592 - RNA, 17 nt, Homo sapiens
gaccaaggauuguacac

SEQ ID NO: 8593 - RNA, 17 nt, Homo sapiens
caaggauuguacaccug

SEQ ID NO: 8594 - RNA, 17 nt, Homo sapiens
guacaccugugcagcau

SEQ ID NO: 8595 - RNA, 17 nt, Homo sapiens
acaccugugcagcaucc

SEQ ID NO: 8596 - RNA, 17 nt, Homo sapiens
ccugugcagcauccagu

SEQ ID NO: 8597 - RNA, 17 nt, Homo sapiens
agcauccagugggcuga

SEQ ID NO: 8598 - RNA, 17 nt, Homo sapiens
uccagugggcugaugac

SEQ ID NO: 8599 - RNA, 17 nt, Homo sapiens
gugggcugaugaccaag

SEQ ID NO: 8600 - RNA, 17 nt, Homo sapiens
ggcugaugaccaagaag

SEQ ID NO: 8601 - RNA, 17 nt, Homo sapiens
caagaagaacagcacau

SEQ ID NO: 8602 - RNA, 17 nt, Homo sapiens
gaagaacagcacauuug

SEQ ID NO: 8603 - RNA, 17 nt, Homo sapiens
gcacauuugucaggguc

SEQ ID NO: 8604 - RNA, 17 nt, Homo sapiens
uugucaggguccaugaa

SEQ ID NO: 8605 - RNA, 17 nt, Homo sapiens
caugaaaaaccuuuugu

SEQ ID NO: 8606 - RNA, 17 nt, Homo sapiens
aaccuuuuguugcuuuu

SEQ ID NO: 8607 - RNA, 17 nt, Homo sapiens
cuuuuguugcuuuugga

SEQ ID NO: 8608 - RNA, 17 nt, Homo sapiens
uuuuggaaguggcaugg

SEQ ID NO: 8609 - RNA, 17 nt, Homo sapiens
uggaaguggcauggaau

SEQ ID NO: 8610 - RNA, 17 nt, Homo sapiens
ggcauggaaucucuggu

SEQ ID NO: 8611 - RNA, 17 nt, Homo sapiens
aaucucugguggaagcc

SEQ ID NO: 8612 - RNA, 17 nt, Homo sapiens
ugguggaagccacggug

SEQ ID NO: 8613 - RNA, 17 nt, Homo sapiens
aagccacggugggggag

SEQ ID NO: 8614 - RNA, 17 nt, Homo sapiens
gugggggagcgugucag

SEQ ID NO: 8615 - RNA, 17 nt, Homo sapiens
gggggagcgugucagaa

SEQ ID NO: 8616 - RNA, 17 nt, Homo sapiens
gggagcgugucagaauc

SEQ ID NO: 8617 - RNA, 17 nt, Homo sapiens
gugucagaaucccugcg

SEQ ID NO: 8618 - RNA, 17 nt, Homo sapiens
gaaucccugcgaaguac

SEQ ID NO: 8619 - RNA, 17 nt, Homo sapiens
ccugcgaaguaccuugg

SEQ ID NO: 8620 - RNA, 17 nt, Homo sapiens
guaccuugguuacccac

SEQ ID NO: 8621 - RNA, 17 nt, Homo sapiens
ccccagaaauaaaaugg

SEQ ID NO: 8622 - RNA, 17 nt, Homo sapiens
gaaauaaaaugguauaa

SEQ ID NO: 8623 - RNA, 17 nt, Homo sapiens
auaaaaugguauaaaaa

SEQ ID NO: 8624 - RNA, 17 nt, Homo sapiens
guauaaaaauggaauac

SEQ ID NO: 8625 - RNA, 17 nt, Homo sapiens
aaaauggaauaccccuu

SEQ ID NO: 8626 - RNA, 17 nt, Homo sapiens
ccccuugaguccaauca

SEQ ID NO: 8627 - RNA, 17 nt, Homo sapiens
ugaguccaaucacacaa

SEQ ID NO: 8628 - RNA, 17 nt, Homo sapiens
aucacacaauuaaagcg

SEQ ID NO: 8629 - RNA, 17 nt, Homo sapiens
caauuaaagcggggcau

SEQ ID NO: 8630 - RNA, 17 nt, Homo sapiens
aaagcggggcauguacu

SEQ ID NO: 8631 - RNA, 17 nt, Homo sapiens
cggggcauguacugacg

SEQ ID NO: 8632 - RNA, 17 nt, Homo sapiens
auguacugacgauuaug

SEQ ID NO: 8633 - RNA, 17 nt, Homo sapiens
uacugacgauuauggaa

SEQ ID NO: 8634 - RNA, 17 nt, Homo sapiens
uuauggaagugagugaa

SEQ ID NO: 8635 - RNA, 17 nt, Homo sapiens
ggaagugagugaaagag

SEQ ID NO: 8636 - RNA, 17 nt, Homo sapiens
ugaaagagacacaggaa

SEQ ID NO: 8637 - RNA, 17 nt, Homo sapiens
cacaggaaauuacacug

SEQ ID NO: 8638 - RNA, 17 nt, Homo sapiens
auuacacugucauccuu

SEQ ID NO: 8639 - RNA, 17 nt, Homo sapiens
ccuuaccaaucccauuu

SEQ ID NO: 8640 - RNA, 17 nt, Homo sapiens
aaggagaagcagagcca

SEQ ID NO: 8641 - RNA, 17 nt, Homo sapiens
gaagcagagccaugugg

SEQ ID NO: 8642 - RNA, 17 nt, Homo sapiens
agagccauguggucucu

SEQ ID NO: 8643 - RNA, 17 nt, Homo sapiens
gccauguggucucucug

SEQ ID NO: 8644 - RNA, 17 nt, Homo sapiens
ucucucugguuguguau

SEQ ID NO: 8645 - RNA, 17 nt, Homo sapiens
cucugguuguguauguc

SEQ ID NO: 8646 - RNA, 17 nt, Homo sapiens
cugguuguguauguccc

SEQ ID NO: 8647 - RNA, 17 nt, Homo sapiens
uuguguaugucccaccc

SEQ ID NO: 8648 - RNA, 17 nt, Homo sapiens
caccccagauuggugag

SEQ ID NO: 8649 - RNA, 17 nt, Homo sapiens
ccagauuggugagaaau

SEQ ID NO: 8650 - RNA, 17 nt, Homo sapiens
ggugagaaaucucuaau

SEQ ID NO: 8651 - RNA, 17 nt, Homo sapiens
aaucucuaaucucuccu

SEQ ID NO: 8652 - RNA, 17 nt, Homo sapiens
ucucuccuguggauucc

SEQ ID NO: 8653 - RNA, 17 nt, Homo sapiens
uccuguggauuccuacc

SEQ ID NO: 8654 - RNA, 17 nt, Homo sapiens
uccuaccaguacggcac

SEQ ID NO: 8655 - RNA, 17 nt, Homo sapiens
ccaguacggcaccacuc

SEQ ID NO: 8656 - RNA, 17 nt, Homo sapiens
ccacucaaacgcugaca

SEQ ID NO: 8657 - RNA, 17 nt, Homo sapiens
acucaaacgcugacaug

SEQ ID NO: 8658 - RNA, 17 nt, Homo sapiens
aaacgcugacauguacg

SEQ ID NO: 8659 - RNA, 17 nt, Homo sapiens
gcugacauguacggucu

SEQ ID NO: 8660 - RNA, 17 nt, Homo sapiens
cauguacggucuaugcc

SEQ ID NO: 8661 - RNA, 17 nt, Homo sapiens
cggucuaugccauuccu

SEQ ID NO: 8662 - RNA, 17 nt, Homo sapiens
ccucccccgcaucacau

SEQ ID NO: 8663 - RNA, 17 nt, Homo sapiens
auccacugguauuggca

SEQ ID NO: 8664 - RNA, 17 nt, Homo sapiens
ugguauuggcaguugga

SEQ ID NO: 8665 - RNA, 17 nt, Homo sapiens
uauuggcaguuggagga

SEQ ID NO: 8666 - RNA, 17 nt, Homo sapiens
gaggaagagugcgccaa

SEQ ID NO: 8667 - RNA, 17 nt, Homo sapiens
ggaagagugcgccaacg

SEQ ID NO: 8668 - RNA, 17 nt, Homo sapiens
aagagugcgccaacgag

SEQ ID NO: 8669 - RNA, 17 nt, Homo sapiens
gugcgccaacgagccca

SEQ ID NO: 8670 - RNA, 17 nt, Homo sapiens
gccaacgagcccagcca

SEQ ID NO: 8671 - RNA, 17 nt, Homo sapiens
cgagcccagccaagcug

SEQ ID NO: 8672 - RNA, 17 nt, Homo sapiens
ccagccaagcugucuca

SEQ ID NO: 8673 - RNA, 17 nt, Homo sapiens
gccaagcugucucagug

SEQ ID NO: 8674 - RNA, 17 nt, Homo sapiens
cugucucagugacaaac

SEQ ID NO: 8675 - RNA, 17 nt, Homo sapiens
ucucagugacaaaccca

SEQ ID NO: 8676 - RNA, 17 nt, Homo sapiens
agugacaaacccauacc

SEQ ID NO: 8677 - RNA, 17 nt, Homo sapiens
auacccuugugaagaau

SEQ ID NO: 8678 - RNA, 17 nt, Homo sapiens
ugugaagaauggagaag

SEQ ID NO: 8679 - RNA, 17 nt, Homo sapiens
auggagaaguguggagg

SEQ ID NO: 8680 - RNA, 17 nt, Homo sapiens
ggagaaguguggaggac

SEQ ID NO: 8681 - RNA, 17 nt, Homo sapiens
uguggaggacuuccagg

SEQ ID NO: 8682 - RNA, 17 nt, Homo sapiens
gggaggaaauaaaauug

SEQ ID NO: 8683 - RNA, 17 nt, Homo sapiens
gaaauaaaauugaaguu

SEQ ID NO: 8684 - RNA, 17 nt, Homo sapiens
aaauugaaguuaauaaa

SEQ ID NO: 8685 - RNA, 17 nt, Homo sapiens
ugaaguuaauaaaaauc

SEQ ID NO: 8686 - RNA, 17 nt, Homo sapiens
uaauaaaaaucaauuug

SEQ ID NO: 8687 - RNA, 17 nt, Homo sapiens
aaaaaucaauuugcucu

SEQ ID NO: 8688 - RNA, 17 nt, Homo sapiens
aucaauuugcucuaauu

SEQ ID NO: 8689 - RNA, 17 nt, Homo sapiens
uugcucuaauugaagga

SEQ ID NO: 8690 - RNA, 17 nt, Homo sapiens
aggaaaaaacaaaacug

SEQ ID NO: 8691 - RNA, 17 nt, Homo sapiens
aaaacaaaacuguaagu

SEQ ID NO: 8692 - RNA, 17 nt, Homo sapiens
acaaaacuguaaguacc

SEQ ID NO: 8693 - RNA, 17 nt, Homo sapiens
aacuguaaguacccuug

SEQ ID NO: 8694 - RNA, 17 nt, Homo sapiens
guacccuuguuauccaa

SEQ ID NO: 8695 - RNA, 17 nt, Homo sapiens
uuauccaagcggcaaau

SEQ ID NO: 8696 - RNA, 17 nt, Homo sapiens
uccaagcggcaaaugug

SEQ ID NO: 8697 - RNA, 17 nt, Homo sapiens
agcggcaaaugugucag

SEQ ID NO: 8698 - RNA, 17 nt, Homo sapiens
cggcaaaugugucagcu

SEQ ID NO: 8699 - RNA, 17 nt, Homo sapiens
gcaaaugugucagcuuu

SEQ ID NO: 8700 - RNA, 17 nt, Homo sapiens
augugucagcuuuguac

SEQ ID NO: 8701 - RNA, 17 nt, Homo sapiens
ucagcuuuguacaaaug

SEQ ID NO: 8702 - RNA, 17 nt, Homo sapiens
uuguacaaaugugaagc

SEQ ID NO: 8703 - RNA, 17 nt, Homo sapiens
guacaaaugugaagcgg

SEQ ID NO: 8704 - RNA, 17 nt, Homo sapiens
aaugugaagcggucaac

SEQ ID NO: 8705 - RNA, 17 nt, Homo sapiens
gugaagcggucaacaaa

SEQ ID NO: 8706 - RNA, 17 nt, Homo sapiens
agcggucaacaaagucg

SEQ ID NO: 8707 - RNA, 17 nt, Homo sapiens
ucaacaaagucgggaga

SEQ ID NO: 8708 - RNA, 17 nt, Homo sapiens
gagagagggugaucucc

SEQ ID NO: 8709 - RNA, 17 nt, Homo sapiens
agagggugaucuccuuc

SEQ ID NO: 8710 - RNA, 17 nt, Homo sapiens
ccuuccacgugaccagg

SEQ ID NO: 8711 - RNA, 17 nt, Homo sapiens
uccacgugaccaggggu

SEQ ID NO: 8712 - RNA, 17 nt, Homo sapiens
gaccagggguccugaaa

SEQ ID NO: 8713 - RNA, 17 nt, Homo sapiens
guccugaaauuacuuug

SEQ ID NO: 8714 - RNA, 17 nt, Homo sapiens
auuacuuugcaaccuga

SEQ ID NO: 8715 - RNA, 17 nt, Homo sapiens
acuuugcaaccugacau

SEQ ID NO: 8716 - RNA, 17 nt, Homo sapiens
gcaaccugacaugcagc

SEQ ID NO: 8717 - RNA, 17 nt, Homo sapiens
ccugacaugcagcccac

SEQ ID NO: 8718 - RNA, 17 nt, Homo sapiens
gacaugcagcccacuga

SEQ ID NO: 8719 - RNA, 17 nt, Homo sapiens
cccacugagcaggagag

SEQ ID NO: 8720 - RNA, 17 nt, Homo sapiens
gcaggagagcgugucuu

SEQ ID NO: 8721 - RNA, 17 nt, Homo sapiens
aggagagcgugucuuug

SEQ ID NO: 8722 - RNA, 17 nt, Homo sapiens
gagagcgugucuuugug

SEQ ID NO: 8723 - RNA, 17 nt, Homo sapiens
gugucuuuguggugcac

SEQ ID NO: 8724 - RNA, 17 nt, Homo sapiens
ucuuuguggugcacugc

SEQ ID NO: 8725 - RNA, 17 nt, Homo sapiens
uuuguggugcacugcag

SEQ ID NO: 8726 - RNA, 17 nt, Homo sapiens
ggugcacugcagacaga

SEQ ID NO: 8727 - RNA, 17 nt, Homo sapiens
cacugcagacagaucua

SEQ ID NO: 8728 - RNA, 17 nt, Homo sapiens
gcagacagaucuacguu

SEQ ID NO: 8729 - RNA, 17 nt, Homo sapiens
agaucuacguuugagaa

SEQ ID NO: 8730 - RNA, 17 nt, Homo sapiens
guuugagaaccucacau

SEQ ID NO: 8731 - RNA, 17 nt, Homo sapiens
cucacaugguacaagcu

SEQ ID NO: 8732 - RNA, 17 nt, Homo sapiens
ugguacaagcuuggccc

SEQ ID NO: 8733 - RNA, 17 nt, Homo sapiens
caagcuuggcccacagc

SEQ ID NO: 8734 - RNA, 17 nt, Homo sapiens
ggcccacagccucugcc

SEQ ID NO: 8735 - RNA, 17 nt, Homo sapiens
cagccucugccaaucca

SEQ ID NO: 8736 - RNA, 17 nt, Homo sapiens
cucugccaauccaugug

SEQ ID NO: 8737 - RNA, 17 nt, Homo sapiens
caauccaugugggagag

SEQ ID NO: 8738 - RNA, 17 nt, Homo sapiens
gugggagaguugcccac

SEQ ID NO: 8739 - RNA, 17 nt, Homo sapiens
ggagaguugcccacacc

SEQ ID NO: 8740 - RNA, 17 nt, Homo sapiens
ccacaccuguuugcaag

SEQ ID NO: 8741 - RNA, 17 nt, Homo sapiens
accuguuugcaagaacu

SEQ ID NO: 8742 - RNA, 17 nt, Homo sapiens
uugcaagaacuuggaua

SEQ ID NO: 8743 - RNA, 17 nt, Homo sapiens
gaacuuggauacucuuu

SEQ ID NO: 8744 - RNA, 17 nt, Homo sapiens
cuuuggaaauugaaugc

SEQ ID NO: 8745 - RNA, 17 nt, Homo sapiens
gaaauugaaugccacca

SEQ ID NO: 8746 - RNA, 17 nt, Homo sapiens
aauugaaugccaccaug

SEQ ID NO: 8747 - RNA, 17 nt, Homo sapiens
gccaccauguucucuaa

SEQ ID NO: 8748 - RNA, 17 nt, Homo sapiens
guucucuaauagcacaa

SEQ ID NO: 8749 - RNA, 17 nt, Homo sapiens
cucuaauagcacaaaug

SEQ ID NO: 8750 - RNA, 17 nt, Homo sapiens
uagcacaaaugacauuu

SEQ ID NO: 8751 - RNA, 17 nt, Homo sapiens
cacaaaugacauuuuga

SEQ ID NO: 8752 - RNA, 17 nt, Homo sapiens
acauuuugaucauggag

SEQ ID NO: 8753 - RNA, 17 nt, Homo sapiens
aucauggagcuuaagaa

SEQ ID NO: 8754 - RNA, 17 nt, Homo sapiens
gcuuaagaaugcauccu

SEQ ID NO: 8755 - RNA, 17 nt, Homo sapiens
uuaagaaugcauccuug

SEQ ID NO: 8756 - RNA, 17 nt, Homo sapiens
gcauccuugcaggacca

SEQ ID NO: 8757 - RNA, 17 nt, Homo sapiens
cuugcaggaccaaggag

SEQ ID NO: 8758 - RNA, 17 nt, Homo sapiens
ccaaggagacuaugucu

SEQ ID NO: 8759 - RNA, 17 nt, Homo sapiens
gagacuaugucugccuu

SEQ ID NO: 8760 - RNA, 17 nt, Homo sapiens
cuaugucugccuugcuc

SEQ ID NO: 8761 - RNA, 17 nt, Homo sapiens
ucugccuugcucaagac

SEQ ID NO: 8762 - RNA, 17 nt, Homo sapiens
ugcucaagacaggaaga

SEQ ID NO: 8763 - RNA, 17 nt, Homo sapiens
acaggaagaccaagaaa

SEQ ID NO: 8764 - RNA, 17 nt, Homo sapiens
aagaaaagacauugcgu

SEQ ID NO: 8765 - RNA, 17 nt, Homo sapiens
aagacauugcgugguca

SEQ ID NO: 8766 - RNA, 17 nt, Homo sapiens
gacauugcguggucagg

SEQ ID NO: 8767 - RNA, 17 nt, Homo sapiens
auugcguggucaggcag

SEQ ID NO: 8768 - RNA, 17 nt, Homo sapiens
guggucaggcagcucac

SEQ ID NO: 8769 - RNA, 17 nt, Homo sapiens
gucaggcagcucacagu

SEQ ID NO: 8770 - RNA, 17 nt, Homo sapiens
agcucacaguccuagag

SEQ ID NO: 8771 - RNA, 17 nt, Homo sapiens
guccuagagcguguggc

SEQ ID NO: 8772 - RNA, 17 nt, Homo sapiens
ccuagagcguguggcac

SEQ ID NO: 8773 - RNA, 17 nt, Homo sapiens
uagagcguguggcaccc

SEQ ID NO: 8774 - RNA, 17 nt, Homo sapiens
agcguguggcacccacg

SEQ ID NO: 8775 - RNA, 17 nt, Homo sapiens
cacccacgaucacagga

SEQ ID NO: 8776 - RNA, 17 nt, Homo sapiens
cacaggaaaccuggaga

SEQ ID NO: 8777 - RNA, 17 nt, Homo sapiens
ccuggagaaucagacga

SEQ ID NO: 8778 - RNA, 17 nt, Homo sapiens
agaaucagacgacaagu

SEQ ID NO: 8779 - RNA, 17 nt, Homo sapiens
aucagacgacaaguauu

SEQ ID NO: 8780 - RNA, 17 nt, Homo sapiens
gacgacaaguauugggg

SEQ ID NO: 8781 - RNA, 17 nt, Homo sapiens
uggggaaagcaucgaag

SEQ ID NO: 8782 - RNA, 17 nt, Homo sapiens
gcaucgaagucucaugc

SEQ ID NO: 8783 - RNA, 17 nt, Homo sapiens
agucucaugcacggcau

SEQ ID NO: 8784 - RNA, 17 nt, Homo sapiens
caugcacggcaucuggg

SEQ ID NO: 8785 - RNA, 17 nt, Homo sapiens
aucugggaaucccccuc

SEQ ID NO: 8786 - RNA, 17 nt, Homo sapiens
cuccacagaucaugugg

SEQ ID NO: 8787 - RNA, 17 nt, Homo sapiens
cagaucaugugguuuaa

SEQ ID NO: 8788 - RNA, 17 nt, Homo sapiens
aucaugugguuuaaaga

SEQ ID NO: 8789 - RNA, 17 nt, Homo sapiens
guuuaaagauaaugaga

SEQ ID NO: 8790 - RNA, 17 nt, Homo sapiens
uaaagauaaugagaccc

SEQ ID NO: 8791 - RNA, 17 nt, Homo sapiens
auaaugagacccuugua

SEQ ID NO: 8792 - RNA, 17 nt, Homo sapiens
agacccuuguagaagac

SEQ ID NO: 8793 - RNA, 17 nt, Homo sapiens
uguagaagacucaggca

SEQ ID NO: 8794 - RNA, 17 nt, Homo sapiens
agacucaggcauuguau

SEQ ID NO: 8795 - RNA, 17 nt, Homo sapiens
caggcauuguauugaag

SEQ ID NO: 8796 - RNA, 17 nt, Homo sapiens
auugaaggaugggaacc

SEQ ID NO: 8797 - RNA, 17 nt, Homo sapiens
ggaugggaaccggaacc

SEQ ID NO: 8798 - RNA, 17 nt, Homo sapiens
gaaccggaaccucacua

SEQ ID NO: 8799 - RNA, 17 nt, Homo sapiens
cacuauccgcagaguga

SEQ ID NO: 8800 - RNA, 17 nt, Homo sapiens
uccgcagagugaggaag

SEQ ID NO: 8801 - RNA, 17 nt, Homo sapiens
gaaggaggacgaaggcc

SEQ ID NO: 8802 - RNA, 17 nt, Homo sapiens
ggacgaaggccucuaca

SEQ ID NO: 8803 - RNA, 17 nt, Homo sapiens
cuacaccugccaggcau

SEQ ID NO: 8804 - RNA, 17 nt, Homo sapiens
ccugccaggcaugcagu

SEQ ID NO: 8805 - RNA, 17 nt, Homo sapiens
ccaggcaugcaguguuc

SEQ ID NO: 8806 - RNA, 17 nt, Homo sapiens
ggcaugcaguguucuug

SEQ ID NO: 8807 - RNA, 17 nt, Homo sapiens
caugcaguguucuuggc

SEQ ID NO: 8808 - RNA, 17 nt, Homo sapiens
uguucuuggcugugcaa

SEQ ID NO: 8809 - RNA, 17 nt, Homo sapiens
ucuuggcugugcaaaag

SEQ ID NO: 8810 - RNA, 17 nt, Homo sapiens
uuggcugugcaaaagug

SEQ ID NO: 8811 - RNA, 17 nt, Homo sapiens
gugcaaaaguggaggca

SEQ ID NO: 8812 - RNA, 17 nt, Homo sapiens
aaguggaggcauuuuuc

SEQ ID NO: 8813 - RNA, 17 nt, Homo sapiens
uuuucauaauagaaggu

SEQ ID NO: 8814 - RNA, 17 nt, Homo sapiens
aauagaaggugcccagg

SEQ ID NO: 8815 - RNA, 17 nt, Homo sapiens
uagaaggugcccaggaa

SEQ ID NO: 8816 - RNA, 17 nt, Homo sapiens
aggaaaagacgaacuug

SEQ ID NO: 8817 - RNA, 17 nt, Homo sapiens
aaagacgaacuuggaaa

SEQ ID NO: 8818 - RNA, 17 nt, Homo sapiens
acuuggaaaucauuauu

SEQ ID NO: 8819 - RNA, 17 nt, Homo sapiens
uuauucuaguaggcacg

SEQ ID NO: 8820 - RNA, 17 nt, Homo sapiens
ucuaguaggcacggcgg

SEQ ID NO: 8821 - RNA, 17 nt, Homo sapiens
uaguaggcacggcggug

SEQ ID NO: 8822 - RNA, 17 nt, Homo sapiens
uaggcacggcggugauu

SEQ ID NO: 8823 - RNA, 17 nt, Homo sapiens
gcacggcggugauugcc

SEQ ID NO: 8824 - RNA, 17 nt, Homo sapiens
cggcggugauugccaug

SEQ ID NO: 8825 - RNA, 17 nt, Homo sapiens
cggugauugccauguuc

SEQ ID NO: 8826 - RNA, 17 nt, Homo sapiens
auugccauguucuucug

SEQ ID NO: 8827 - RNA, 17 nt, Homo sapiens
uucuucuggcuacuucu

SEQ ID NO: 8828 - RNA, 17 nt, Homo sapiens
uacuucuugucaucauc

SEQ ID NO: 8829 - RNA, 17 nt, Homo sapiens
uugucaucauccuacgg

SEQ ID NO: 8830 - RNA, 17 nt, Homo sapiens
aucauccuacggaccgu

SEQ ID NO: 8831 - RNA, 17 nt, Homo sapiens
uccuacggaccguuaag

SEQ ID NO: 8832 - RNA, 17 nt, Homo sapiens
uacggaccguuaagcgg

SEQ ID NO: 8833 - RNA, 17 nt, Homo sapiens
accguuaagcgggccaa

SEQ ID NO: 8834 - RNA, 17 nt, Homo sapiens
uuaagcgggccaaugga

SEQ ID NO: 8835 - RNA, 17 nt, Homo sapiens
gcgggccaauggagggg

SEQ ID NO: 8836 - RNA, 17 nt, Homo sapiens
ggaggggaacugaagac

SEQ ID NO: 8837 - RNA, 17 nt, Homo sapiens
aacugaagacaggcuac

SEQ ID NO: 8838 - RNA, 17 nt, Homo sapiens
gaagacaggcuacuugu

SEQ ID NO: 8839 - RNA, 17 nt, Homo sapiens
ggcuacuuguccaucgu

SEQ ID NO: 8840 - RNA, 17 nt, Homo sapiens
uguccaucgucauggau

SEQ ID NO: 8841 - RNA, 17 nt, Homo sapiens
cgucauggauccagaug

SEQ ID NO: 8842 - RNA, 17 nt, Homo sapiens
ggauccagaugaacucc

SEQ ID NO: 8843 - RNA, 17 nt, Homo sapiens
ccagaugaacucccauu

SEQ ID NO: 8844 - RNA, 17 nt, Homo sapiens
cccauuggaugaacauu

SEQ ID NO: 8845 - RNA, 17 nt, Homo sapiens
uuggaugaacauuguga

SEQ ID NO: 8846 - RNA, 17 nt, Homo sapiens
ugaacauugugaacgac

SEQ ID NO: 8847 - RNA, 17 nt, Homo sapiens
cauugugaacgacugcc

SEQ ID NO: 8848 - RNA, 17 nt, Homo sapiens
ugugaacgacugccuua

SEQ ID NO: 8849 - RNA, 17 nt, Homo sapiens
gaacgacugccuuauga

SEQ ID NO: 8850 - RNA, 17 nt, Homo sapiens
gccuuaugaugccagca

SEQ ID NO: 8851 - RNA, 17 nt, Homo sapiens
cuuaugaugccagcaaa

SEQ ID NO: 8852 - RNA, 17 nt, Homo sapiens
ugaugccagcaaauggg

SEQ ID NO: 8853 - RNA, 17 nt, Homo sapiens
gccagcaaaugggaauu

SEQ ID NO: 8854 - RNA, 17 nt, Homo sapiens
aaaugggaauuccccag

SEQ ID NO: 8855 - RNA, 17 nt, Homo sapiens
ccccagagaccggcuga

SEQ ID NO: 8856 - RNA, 17 nt, Homo sapiens
agagaccggcugaagcu

SEQ ID NO: 8857 - RNA, 17 nt, Homo sapiens
cggcugaagcuagguaa

SEQ ID NO: 8858 - RNA, 17 nt, Homo sapiens
gaagcuagguaagccuc

SEQ ID NO: 8859 - RNA, 17 nt, Homo sapiens
cuagguaagccucuugg

SEQ ID NO: 8860 - RNA, 17 nt, Homo sapiens
gccucuuggccguggug

SEQ ID NO: 8861 - RNA, 17 nt, Homo sapiens
ucuuggccguggugccu

SEQ ID NO: 8862 - RNA, 17 nt, Homo sapiens
uggccguggugccuuug

SEQ ID NO: 8863 - RNA, 17 nt, Homo sapiens
gccguggugccuuuggc

SEQ ID NO: 8864 - RNA, 17 nt, Homo sapiens
ugccuuuggccaaguga

SEQ ID NO: 8865 - RNA, 17 nt, Homo sapiens
uuggccaagugauugaa

SEQ ID NO: 8866 - RNA, 17 nt, Homo sapiens
gccaagugauugaagca

SEQ ID NO: 8867 - RNA, 17 nt, Homo sapiens
ugauugaagcagaugcc

SEQ ID NO: 8868 - RNA, 17 nt, Homo sapiens
ugaagcagaugccuuug

SEQ ID NO: 8869 - RNA, 17 nt, Homo sapiens
aagcagaugccuuugga

SEQ ID NO: 8870 - RNA, 17 nt, Homo sapiens
ccuuuggaauugacaag

SEQ ID NO: 8871 - RNA, 17 nt, Homo sapiens
uggaauugacaagacag

SEQ ID NO: 8872 - RNA, 17 nt, Homo sapiens
uugacaagacagcaacu

SEQ ID NO: 8873 - RNA, 17 nt, Homo sapiens
acaagacagcaacuugc

SEQ ID NO: 8874 - RNA, 17 nt, Homo sapiens
agacagcaacuugcagg

SEQ ID NO: 8875 - RNA, 17 nt, Homo sapiens
agcaacuugcaggacag

SEQ ID NO: 8876 - RNA, 17 nt, Homo sapiens
cuugcaggacaguagca

SEQ ID NO: 8877 - RNA, 17 nt, Homo sapiens
gcaggacaguagcaguc

SEQ ID NO: 8878 - RNA, 17 nt, Homo sapiens
ggacaguagcagucaaa

SEQ ID NO: 8879 - RNA, 17 nt, Homo sapiens
caguagcagucaaaaug

SEQ ID NO: 8880 - RNA, 17 nt, Homo sapiens
cagucaaaauguugaaa

SEQ ID NO: 8881 - RNA, 17 nt, Homo sapiens
gucaaaauguugaaaga

SEQ ID NO: 8882 - RNA, 17 nt, Homo sapiens
aagaaggagcaacacac

SEQ ID NO: 8883 - RNA, 17 nt, Homo sapiens
aaggagcaacacacagu

SEQ ID NO: 8884 - RNA, 17 nt, Homo sapiens
aacacacagugagcauc

SEQ ID NO: 8885 - RNA, 17 nt, Homo sapiens
cacagugagcaucgagc

SEQ ID NO: 8886 - RNA, 17 nt, Homo sapiens
agcaucgagcucucaug

SEQ ID NO: 8887 - RNA, 17 nt, Homo sapiens
gcucucaugucugaacu

SEQ ID NO: 8888 - RNA, 17 nt, Homo sapiens
augucugaacucaagau

SEQ ID NO: 8889 - RNA, 17 nt, Homo sapiens
aacucaagauccucauu

SEQ ID NO: 8890 - RNA, 17 nt, Homo sapiens
ucauauuggucaccauc

SEQ ID NO: 8891 - RNA, 17 nt, Homo sapiens
ccaucucaaugugguca

SEQ ID NO: 8892 - RNA, 17 nt, Homo sapiens
aucucaauguggucaac

SEQ ID NO: 8893 - RNA, 17 nt, Homo sapiens
ucaauguggucaaccuu

SEQ ID NO: 8894 - RNA, 17 nt, Homo sapiens
uguggucaaccuucuag

SEQ ID NO: 8895 - RNA, 17 nt, Homo sapiens
ccuucuaggugccugua

SEQ ID NO: 8896 - RNA, 17 nt, Homo sapiens
uucuaggugccuguacc

SEQ ID NO: 8897 - RNA, 17 nt, Homo sapiens
aggugccuguaccaagc

SEQ ID NO: 8898 - RNA, 17 nt, Homo sapiens
uguaccaagccaggagg

SEQ ID NO: 8899 - RNA, 17 nt, Homo sapiens
ccaggagggccacucau

SEQ ID NO: 8900 - RNA, 17 nt, Homo sapiens
cacucauggugauugug

SEQ ID NO: 8901 - RNA, 17 nt, Homo sapiens
ucauggugauuguggaa

SEQ ID NO: 8902 - RNA, 17 nt, Homo sapiens
uggugauuguggaauuc

SEQ ID NO: 8903 - RNA, 17 nt, Homo sapiens
auuguggaauucugcaa

SEQ ID NO: 8904 - RNA, 17 nt, Homo sapiens
ggaauucugcaaauuug

SEQ ID NO: 8905 - RNA, 17 nt, Homo sapiens
uucugcaaauuuggaaa

SEQ ID NO: 8906 - RNA, 17 nt, Homo sapiens
auuuggaaaccugucca

SEQ ID NO: 8907 - RNA, 17 nt, Homo sapiens
ggaaaccuguccacuua

SEQ ID NO: 8908 - RNA, 17 nt, Homo sapiens
ccugaggagcaagagaa

SEQ ID NO: 8909 - RNA, 17 nt, Homo sapiens
caagagaaaugaauuug

SEQ ID NO: 8910 - RNA, 17 nt, Homo sapiens
agaaaugaauuuguccc

SEQ ID NO: 8911 - RNA, 17 nt, Homo sapiens
augaauuuguccccuac

SEQ ID NO: 8912 - RNA, 17 nt, Homo sapiens
ccuacaagaccaaaggg

SEQ ID NO: 8913 - RNA, 17 nt, Homo sapiens
ccaaaggggcacgauuc

SEQ ID NO: 8914 - RNA, 17 nt, Homo sapiens
ggggcacgauuccguca

SEQ ID NO: 8915 - RNA, 17 nt, Homo sapiens
acgauuccgucaaggga

SEQ ID NO: 8916 - RNA, 17 nt, Homo sapiens
agggaaagacuacguug

SEQ ID NO: 8917 - RNA, 17 nt, Homo sapiens
aagacuacguuggagca

SEQ ID NO: 8918 - RNA, 17 nt, Homo sapiens
acguuggagcaaucccu

SEQ ID NO: 8919 - RNA, 17 nt, Homo sapiens
uuggagcaaucccugug

SEQ ID NO: 8920 - RNA, 17 nt, Homo sapiens
caaucccuguggaucug

SEQ ID NO: 8921 - RNA, 17 nt, Homo sapiens
cccuguggaucugaaac

SEQ ID NO: 8922 - RNA, 17 nt, Homo sapiens
gaucugaaacggcgcuu

SEQ ID NO: 8923 - RNA, 17 nt, Homo sapiens
cugaaacggcgcuugga

SEQ ID NO: 8924 - RNA, 17 nt, Homo sapiens
gaaacggcgcuuggaca

SEQ ID NO: 8925 - RNA, 17 nt, Homo sapiens
gcgcuuggacagcauca

SEQ ID NO: 8926 - RNA, 17 nt, Homo sapiens
cuuggacagcaucacca

SEQ ID NO: 8927 - RNA, 17 nt, Homo sapiens
caucaccaguagccaga

SEQ ID NO: 8928 - RNA, 17 nt, Homo sapiens
caccaguagccagagcu

SEQ ID NO: 8929 - RNA, 17 nt, Homo sapiens
uagccagagcucagcca

SEQ ID NO: 8930 - RNA, 17 nt, Homo sapiens
agagcucagccagcucu

SEQ ID NO: 8931 - RNA, 17 nt, Homo sapiens
cucagccagcucuggau

SEQ ID NO: 8932 - RNA, 17 nt, Homo sapiens
agcucuggauuugugga

SEQ ID NO: 8933 - RNA, 17 nt, Homo sapiens
cuggauuuguggaggag

SEQ ID NO: 8934 - RNA, 17 nt, Homo sapiens
gaggagaagucccucag

SEQ ID NO: 8935 - RNA, 17 nt, Homo sapiens
gucccucagugauguag

SEQ ID NO: 8936 - RNA, 17 nt, Homo sapiens
ccucagugauguagaag

SEQ ID NO: 8937 - RNA, 17 nt, Homo sapiens
ucagugauguagaagaa

SEQ ID NO: 8938 - RNA, 17 nt, Homo sapiens
aagaggaagcuccugaa

SEQ ID NO: 8939 - RNA, 17 nt, Homo sapiens
uccugaagaucuguaua

SEQ ID NO: 8940 - RNA, 17 nt, Homo sapiens
gaagaucuguauaagga

SEQ ID NO: 8941 - RNA, 17 nt, Homo sapiens
guauaaggacuuccuga

SEQ ID NO: 8942 - RNA, 17 nt, Homo sapiens
acuuccugaccuuggag

SEQ ID NO: 8943 - RNA, 17 nt, Homo sapiens
accuuggagcaucucau

SEQ ID NO: 8944 - RNA, 17 nt, Homo sapiens
ucucaucuguuacagcu

SEQ ID NO: 8945 - RNA, 17 nt, Homo sapiens
cuguuacagcuuccaag

SEQ ID NO: 8946 - RNA, 17 nt, Homo sapiens
gcuuccaaguggcuaag

SEQ ID NO: 8947 - RNA, 17 nt, Homo sapiens
uccaaguggcuaagggc

SEQ ID NO: 8948 - RNA, 17 nt, Homo sapiens
ggcuaagggcauggagu

SEQ ID NO: 8949 - RNA, 17 nt, Homo sapiens
ggcauggaguucuuggc

SEQ ID NO: 8950 - RNA, 17 nt, Homo sapiens
aguucuuggcaucgcga

SEQ ID NO: 8951 - RNA, 17 nt, Homo sapiens
uuggcaucgcgaaagug

SEQ ID NO: 8952 - RNA, 17 nt, Homo sapiens
ucgcgaaaguguaucca

SEQ ID NO: 8953 - RNA, 17 nt, Homo sapiens
gcgaaaguguauccaca

SEQ ID NO: 8954 - RNA, 17 nt, Homo sapiens
ccacagggaccuggcgg

SEQ ID NO: 8955 - RNA, 17 nt, Homo sapiens
gggaccuggcggcacga

SEQ ID NO: 8956 - RNA, 17 nt, Homo sapiens
accuggcggcacgaaau

SEQ ID NO: 8957 - RNA, 17 nt, Homo sapiens
ggcacgaaauauccucu

SEQ ID NO: 8958 - RNA, 17 nt, Homo sapiens
ggagaagaacgugguua

SEQ ID NO: 8959 - RNA, 17 nt, Homo sapiens
agaagaacgugguuaaa

SEQ ID NO: 8960 - RNA, 17 nt, Homo sapiens
agaacgugguuaaaauc

SEQ ID NO: 8961 - RNA, 17 nt, Homo sapiens
ugguuaaaaucugugac

SEQ ID NO: 8962 - RNA, 17 nt, Homo sapiens
uaaaaucugugacuuug

SEQ ID NO: 8963 - RNA, 17 nt, Homo sapiens
aaucugugacuuuggcu

SEQ ID NO: 8964 - RNA, 17 nt, Homo sapiens
ugacuuuggcuuggccc

SEQ ID NO: 8965 - RNA, 17 nt, Homo sapiens
uuggcuuggcccgggau

SEQ ID NO: 8966 - RNA, 17 nt, Homo sapiens
ggcccgggauauuuaua

SEQ ID NO: 8967 - RNA, 17 nt, Homo sapiens
uuauaaagauccagauu

SEQ ID NO: 8968 - RNA, 17 nt, Homo sapiens
agauccagauuauguca

SEQ ID NO: 8969 - RNA, 17 nt, Homo sapiens
cagauuaugucagaaaa

SEQ ID NO: 8970 - RNA, 17 nt, Homo sapiens
aaaaggagaugcucgcc

SEQ ID NO: 8971 - RNA, 17 nt, Homo sapiens
aaggagaugcucgccuc

SEQ ID NO: 8972 - RNA, 17 nt, Homo sapiens
agaugcucgccucccuu

SEQ ID NO: 8973 - RNA, 17 nt, Homo sapiens
ccuuugaaauggauggc

SEQ ID NO: 8974 - RNA, 17 nt, Homo sapiens
ugaaauggauggcccca

SEQ ID NO: 8975 - RNA, 17 nt, Homo sapiens
aauggauggccccagaa

SEQ ID NO: 8976 - RNA, 17 nt, Homo sapiens
ccccagaaacaauuuuu

SEQ ID NO: 8977 - RNA, 17 nt, Homo sapiens
cagaaacaauuuuugac

SEQ ID NO: 8978 - RNA, 17 nt, Homo sapiens
aauuuuugacagagugu

SEQ ID NO: 8979 - RNA, 17 nt, Homo sapiens
uugacagaguguacaca

SEQ ID NO: 8980 - RNA, 17 nt, Homo sapiens
gacagaguguacacaau

SEQ ID NO: 8981 - RNA, 17 nt, Homo sapiens
uguacacaauccagagu

SEQ ID NO: 8982 - RNA, 17 nt, Homo sapiens
aauccagagugacgucu

SEQ ID NO: 8983 - RNA, 17 nt, Homo sapiens
ccagagugacgucuggu

SEQ ID NO: 8984 - RNA, 17 nt, Homo sapiens
agagugacgucuggucu

SEQ ID NO: 8985 - RNA, 17 nt, Homo sapiens
gacgucuggucuuuugg

SEQ ID NO: 8986 - RNA, 17 nt, Homo sapiens
gucuuuugguguuuugc

SEQ ID NO: 8987 - RNA, 17 nt, Homo sapiens
cuuuugguguuuugcug

SEQ ID NO: 8988 - RNA, 17 nt, Homo sapiens
gguguuuugcuguggga

SEQ ID NO: 8989 - RNA, 17 nt, Homo sapiens
guuuugcugugggaaau

SEQ ID NO: 8990 - RNA, 17 nt, Homo sapiens
ugugggaaauauuuucc

SEQ ID NO: 8991 - RNA, 17 nt, Homo sapiens
uuccuuaggugcuucuc

SEQ ID NO: 8992 - RNA, 17 nt, Homo sapiens
ccuuaggugcuucucca

SEQ ID NO: 8993 - RNA, 17 nt, Homo sapiens
auccugggguaaagauu

SEQ ID NO: 8994 - RNA, 17 nt, Homo sapiens
ggguaaagauugaugaa

SEQ ID NO: 8995 - RNA, 17 nt, Homo sapiens
aaagauugaugaagaau

SEQ ID NO: 8996 - RNA, 17 nt, Homo sapiens
gaugaagaauuuuguag

SEQ ID NO: 8997 - RNA, 17 nt, Homo sapiens
agaauuuuguaggcgau

SEQ ID NO: 8998 - RNA, 17 nt, Homo sapiens
uuuuguaggcgauugaa

SEQ ID NO: 8999 - RNA, 17 nt, Homo sapiens
uguaggcgauugaaaga

SEQ ID NO: 9000 - RNA, 17 nt, Homo sapiens
aagaaggaacuagaaug

SEQ ID NO: 9001 - RNA, 17 nt, Homo sapiens
gaacuagaaugagggcc

SEQ ID NO: 9002 - RNA, 17 nt, Homo sapiens
gaaugagggccccugau

SEQ ID NO: 9003 - RNA, 17 nt, Homo sapiens
ggccccugauuauacua

SEQ ID NO: 9004 - RNA, 17 nt, Homo sapiens
caccagaaauguaccag

SEQ ID NO: 9005 - RNA, 17 nt, Homo sapiens
ccagaaauguaccagac

SEQ ID NO: 9006 - RNA, 17 nt, Homo sapiens
uguaccagaccaugcug

SEQ ID NO: 9007 - RNA, 17 nt, Homo sapiens
cagaccaugcuggacug

SEQ ID NO: 9008 - RNA, 17 nt, Homo sapiens
gcuggacugcuggcacg

SEQ ID NO: 9009 - RNA, 17 nt, Homo sapiens
gacugcuggcacgggga

SEQ ID NO: 9010 - RNA, 17 nt, Homo sapiens
cacggggagcccaguca

SEQ ID NO: 9011 - RNA, 17 nt, Homo sapiens
ggagcccagucagagac

SEQ ID NO: 9012 - RNA, 17 nt, Homo sapiens
agucagagacccacguu

SEQ ID NO: 9013 - RNA, 17 nt, Homo sapiens
agacccacguuuucaga

SEQ ID NO: 9014 - RNA, 17 nt, Homo sapiens
uuuucagaguuggugga

SEQ ID NO: 9015 - RNA, 17 nt, Homo sapiens
cagaguugguggaacau

SEQ ID NO: 9016 - RNA, 17 nt, Homo sapiens
uugguggaacauuuggg

SEQ ID NO: 9017 - RNA, 17 nt, Homo sapiens
uuugggaaaucucuugc

SEQ ID NO: 9018 - RNA, 17 nt, Homo sapiens
aaucucuugcaagcuaa

SEQ ID NO: 9019 - RNA, 17 nt, Homo sapiens
ucuugcaagcuaaugcu

SEQ ID NO: 9020 - RNA, 17 nt, Homo sapiens
gcaagcuaaugcucagc

SEQ ID NO: 9021 - RNA, 17 nt, Homo sapiens
aagcuaaugcucagcag

SEQ ID NO: 9022 - RNA, 17 nt, Homo sapiens
aaugcucagcaggaugg

SEQ ID NO: 9023 - RNA, 17 nt, Homo sapiens
ucagcaggauggcaaag

SEQ ID NO: 9024 - RNA, 17 nt, Homo sapiens
gcaggauggcaaagacu

SEQ ID NO: 9025 - RNA, 17 nt, Homo sapiens
uggcaaagacuacauug

SEQ ID NO: 9026 - RNA, 17 nt, Homo sapiens
acuacauuguucuuccg

SEQ ID NO: 9027 - RNA, 17 nt, Homo sapiens
uucuuccgauaucagag

SEQ ID NO: 9028 - RNA, 17 nt, Homo sapiens
uaucagagacuuugagc

SEQ ID NO: 9029 - RNA, 17 nt, Homo sapiens
gacuuugagcauggaag

SEQ ID NO: 9030 - RNA, 17 nt, Homo sapiens
ggaagaggauucuggac

SEQ ID NO: 9031 - RNA, 17 nt, Homo sapiens
gauucuggacucucucu

SEQ ID NO: 9032 - RNA, 17 nt, Homo sapiens
cucucucugccuaccuc

SEQ ID NO: 9033 - RNA, 17 nt, Homo sapiens
ccucaccuguuuccugu

SEQ ID NO: 9034 - RNA, 17 nt, Homo sapiens
uguuuccuguauggagg

SEQ ID NO: 9035 - RNA, 17 nt, Homo sapiens
aggaggaaguaugugac

SEQ ID NO: 9036 - RNA, 17 nt, Homo sapiens
ggaaguaugugacccca

SEQ ID NO: 9037 - RNA, 17 nt, Homo sapiens
aguaugugaccccaaau

SEQ ID NO: 9038 - RNA, 17 nt, Homo sapiens
gaccccaaauuccauua

SEQ ID NO: 9039 - RNA, 17 nt, Homo sapiens
ccauuaugacaacacag

SEQ ID NO: 9040 - RNA, 17 nt, Homo sapiens
uuaugacaacacagcag

SEQ ID NO: 9041 - RNA, 17 nt, Homo sapiens
acaacacagcaggaauc

SEQ ID NO: 9042 - RNA, 17 nt, Homo sapiens
cagcaggaaucagucag

SEQ ID NO: 9043 - RNA, 17 nt, Homo sapiens
aggaaucagucaguauc

SEQ ID NO: 9044 - RNA, 17 nt, Homo sapiens
aucagucaguaucugca

SEQ ID NO: 9045 - RNA, 17 nt, Homo sapiens
caguaucugcagaacag

SEQ ID NO: 9046 - RNA, 17 nt, Homo sapiens
ucugcagaacaguaagc

SEQ ID NO: 9047 - RNA, 17 nt, Homo sapiens
gcagaacaguaagcgaa

SEQ ID NO: 9048 - RNA, 17 nt, Homo sapiens
aacaguaagcgaaagag

SEQ ID NO: 9049 - RNA, 17 nt, Homo sapiens
gcgaaagagccggccug

SEQ ID NO: 9050 - RNA, 17 nt, Homo sapiens
aagagccggccugugag

SEQ ID NO: 9051 - RNA, 17 nt, Homo sapiens
gccggccugugagugua

SEQ ID NO: 9052 - RNA, 17 nt, Homo sapiens
gccugugaguguaaaaa

SEQ ID NO: 9053 - RNA, 17 nt, Homo sapiens
cugugaguguaaaaaca

SEQ ID NO: 9054 - RNA, 17 nt, Homo sapiens
guguaaaaacauuugaa

SEQ ID NO: 9055 - RNA, 17 nt, Homo sapiens
auuugaagauaucccgu

SEQ ID NO: 9056 - RNA, 17 nt, Homo sapiens
gauaucccguuagaaga

SEQ ID NO: 9057 - RNA, 17 nt, Homo sapiens
uuagaagaaccagaagu

SEQ ID NO: 9058 - RNA, 17 nt, Homo sapiens
aaccagaaguaaaagua

SEQ ID NO: 9059 - RNA, 17 nt, Homo sapiens
aaguaaaaguaauccca

SEQ ID NO: 9060 - RNA, 17 nt, Homo sapiens
uaaaaguaaucccagau

SEQ ID NO: 9061 - RNA, 17 nt, Homo sapiens
aaucccagaugacaacc

SEQ ID NO: 9062 - RNA, 17 nt, Homo sapiens
cccagaugacaaccaga

SEQ ID NO: 9063 - RNA, 17 nt, Homo sapiens
agaugacaaccagacgg

SEQ ID NO: 9064 - RNA, 17 nt, Homo sapiens
acaaccagacggacagu

SEQ ID NO: 9065 - RNA, 17 nt, Homo sapiens
ccagacggacaguggua

SEQ ID NO: 9066 - RNA, 17 nt, Homo sapiens
gacggacagugguaugg

SEQ ID NO: 9067 - RNA, 17 nt, Homo sapiens
ggacagugguaugguuc

SEQ ID NO: 9068 - RNA, 17 nt, Homo sapiens
gugguaugguucuugcc

SEQ ID NO: 9069 - RNA, 17 nt, Homo sapiens
ugguucuugccucagaa

SEQ ID NO: 9070 - RNA, 17 nt, Homo sapiens
ucagaagagcugaaaac

SEQ ID NO: 9071 - RNA, 17 nt, Homo sapiens
agcugaaaacuuuggaa

SEQ ID NO: 9072 - RNA, 17 nt, Homo sapiens
uuuggaagacagaacca

SEQ ID NO: 9073 - RNA, 17 nt, Homo sapiens
aagacagaaccaaauua

SEQ ID NO: 9074 - RNA, 17 nt, Homo sapiens
agaaccaaauuaucucc

SEQ ID NO: 9075 - RNA, 17 nt, Homo sapiens
aucuuuugguggaaugg

SEQ ID NO: 9076 - RNA, 17 nt, Homo sapiens
uugguggaauggugccc

SEQ ID NO: 9077 - RNA, 17 nt, Homo sapiens
guggaauggugcccagc

SEQ ID NO: 9078 - RNA, 17 nt, Homo sapiens
ggaauggugcccagcaa

SEQ ID NO: 9079 - RNA, 17 nt, Homo sapiens
ggugcccagcaaaagca

SEQ ID NO: 9080 - RNA, 17 nt, Homo sapiens
cagcaaaagcagggagu

SEQ ID NO: 9081 - RNA, 17 nt, Homo sapiens
agcagggagucuguggc

SEQ ID NO: 9082 - RNA, 17 nt, Homo sapiens
gggagucuguggcaucu

SEQ ID NO: 9083 - RNA, 17 nt, Homo sapiens
agucuguggcaucugaa

SEQ ID NO: 9084 - RNA, 17 nt, Homo sapiens
aucugaaggcucaaacc

SEQ ID NO: 9085 - RNA, 17 nt, Homo sapiens
aggcucaaaccagacaa

SEQ ID NO: 9086 - RNA, 17 nt, Homo sapiens
caaaccagacaagcggc

SEQ ID NO: 9087 - RNA, 17 nt, Homo sapiens
ccagacaagcggcuacc

SEQ ID NO: 9088 - RNA, 17 nt, Homo sapiens
gacaagcggcuaccagu

SEQ ID NO: 9089 - RNA, 17 nt, Homo sapiens
ggcuaccaguccggaua

SEQ ID NO: 9090 - RNA, 17 nt, Homo sapiens
caguccggauaucacuc

SEQ ID NO: 9091 - RNA, 17 nt, Homo sapiens
ucacuccgaugacacag

SEQ ID NO: 9092 - RNA, 17 nt, Homo sapiens
cuccgaugacacagaca

SEQ ID NO: 9093 - RNA, 17 nt, Homo sapiens
ugacacagacaccaccg

SEQ ID NO: 9094 - RNA, 17 nt, Homo sapiens
acaccaccguguacucc

SEQ ID NO: 9095 - RNA, 17 nt, Homo sapiens
accaccguguacuccag

SEQ ID NO: 9096 - RNA, 17 nt, Homo sapiens
guacuccagugaggaag

SEQ ID NO: 9097 - RNA, 17 nt, Homo sapiens
gugaggaagcagaacuu

SEQ ID NO: 9098 - RNA, 17 nt, Homo sapiens
gaagcagaacuuuuaaa

SEQ ID NO: 9099 - RNA, 17 nt, Homo sapiens
cuuuuaaagcugauaga

SEQ ID NO: 9100 - RNA, 17 nt, Homo sapiens
uaaagcugauagagauu

SEQ ID NO: 9101 - RNA, 17 nt, Homo sapiens
ugauagagauuggagug

SEQ ID NO: 9102 - RNA, 17 nt, Homo sapiens
agauuggagugcaaacc

SEQ ID NO: 9103 - RNA, 17 nt, Homo sapiens
auuggagugcaaaccgg

SEQ ID NO: 9104 - RNA, 17 nt, Homo sapiens
gagugcaaaccgguagc

SEQ ID NO: 9105 - RNA, 17 nt, Homo sapiens
gcaaaccgguagcacag

SEQ ID NO: 9106 - RNA, 17 nt, Homo sapiens
aaccgguagcacagccc

SEQ ID NO: 9107 - RNA, 17 nt, Homo sapiens
guagcacagcccagauu

SEQ ID NO: 9108 - RNA, 17 nt, Homo sapiens
cagcccagauucuccag

SEQ ID NO: 9109 - RNA, 17 nt, Homo sapiens
auucuccagccugacuc

SEQ ID NO: 9110 - RNA, 17 nt, Homo sapiens
ccagccugacucgggga

SEQ ID NO: 9111 - RNA, 17 nt, Homo sapiens
acucggggaccacacug

SEQ ID NO: 9112 - RNA, 17 nt, Homo sapiens
cacacugagcucuccuc

SEQ ID NO: 9113 - RNA, 17 nt, Homo sapiens
cuccuccuguuuaaaag

SEQ ID NO: 9114 - RNA, 17 nt, Homo sapiens
aaaaggaagcauccaca

SEQ ID NO: 9115 - RNA, 17 nt, Homo sapiens
acaccccaacucccgga

SEQ ID NO: 9116 - RNA, 17 nt, Homo sapiens
acucccggacaucacau

SEQ ID NO: 9117 - RNA, 17 nt, Homo sapiens
caugagaggucugcuca

SEQ ID NO: 9118 - RNA, 17 nt, Homo sapiens
agaggucugcucagauu

SEQ ID NO: 9119 - RNA, 17 nt, Homo sapiens
cugcucagauuuugaag

SEQ ID NO: 9120 - RNA, 17 nt, Homo sapiens
auuuugaaguguuguuc

SEQ ID NO: 9121 - RNA, 17 nt, Homo sapiens
uuugaaguguuguucuu

SEQ ID NO: 9122 - RNA, 17 nt, Homo sapiens
gaaguguuguucuuucc

SEQ ID NO: 9123 - RNA, 17 nt, Homo sapiens
uuccaccagcaggaagu

SEQ ID NO: 9124 - RNA, 17 nt, Homo sapiens
agcaggaaguagccgca

SEQ ID NO: 9125 - RNA, 17 nt, Homo sapiens
aggaaguagccgcauuu

SEQ ID NO: 9126 - RNA, 17 nt, Homo sapiens
aaguagccgcauuugau

SEQ ID NO: 9127 - RNA, 17 nt, Homo sapiens
cgcauuugauuuucauu

SEQ ID NO: 9128 - RNA, 17 nt, Homo sapiens
ucauuucgacaacagaa

SEQ ID NO: 9129 - RNA, 17 nt, Homo sapiens
uuucgacaacagaaaaa

SEQ ID NO: 9130 - RNA, 17 nt, Homo sapiens
gaaaaaggaccucggac

SEQ ID NO: 9131 - RNA, 17 nt, Homo sapiens
gaccucggacugcaggg

SEQ ID NO: 9132 - RNA, 17 nt, Homo sapiens
cucggacugcagggagc

SEQ ID NO: 9133 - RNA, 17 nt, Homo sapiens
ugcagggagccagucuu

SEQ ID NO: 9134 - RNA, 17 nt, Homo sapiens
gggagccagucuucuag

SEQ ID NO: 9135 - RNA, 17 nt, Homo sapiens
ucuucuaggcauauccu

SEQ ID NO: 9136 - RNA, 17 nt, Homo sapiens
uucuaggcauauccugg

SEQ ID NO: 9137 - RNA, 17 nt, Homo sapiens
cuaggcauauccuggaa

SEQ ID NO: 9138 - RNA, 17 nt, Homo sapiens
uggaagaggcuugugac

SEQ ID NO: 9139 - RNA, 17 nt, Homo sapiens
agaggcuugugacccaa

SEQ ID NO: 9140 - RNA, 17 nt, Homo sapiens
ggcuugugacccaagaa

SEQ ID NO: 9141 - RNA, 17 nt, Homo sapiens
acccaagaaugugucug

SEQ ID NO: 9142 - RNA, 17 nt, Homo sapiens
ccaagaaugugucugug

SEQ ID NO: 9143 - RNA, 17 nt, Homo sapiens
aagaaugugucuguguc

SEQ ID NO: 9144 - RNA, 17 nt, Homo sapiens
augugucugugucuucu

SEQ ID NO: 9145 - RNA, 17 nt, Homo sapiens
gugucugugucuucucc

SEQ ID NO: 9146 - RNA, 17 nt, Homo sapiens
uucucccaguguugacc

SEQ ID NO: 9147 - RNA, 17 nt, Homo sapiens
cucccaguguugaccug

SEQ ID NO: 9148 - RNA, 17 nt, Homo sapiens
caguguugaccugaucc

SEQ ID NO: 9149 - RNA, 17 nt, Homo sapiens
uugaccugauccucuuu

SEQ ID NO: 9150 - RNA, 17 nt, Homo sapiens
cuuuuuucauucauuua

SEQ ID NO: 9151 - RNA, 17 nt, Homo sapiens
uuucauucauuuaaaaa

SEQ ID NO: 9152 - RNA, 17 nt, Homo sapiens
uuuaaaaagcauuauca

SEQ ID NO: 9153 - RNA, 17 nt, Homo sapiens
uaaaaagcauuaucaug

SEQ ID NO: 9154 - RNA, 17 nt, Homo sapiens
aaagcauuaucaugccc

SEQ ID NO: 9155 - RNA, 17 nt, Homo sapiens
gcauuaucaugccccug

SEQ ID NO: 9156 - RNA, 17 nt, Homo sapiens
auuaucaugccccugcu

SEQ ID NO: 9157 - RNA, 17 nt, Homo sapiens
augccccugcugcgggu

SEQ ID NO: 9158 - RNA, 17 nt, Homo sapiens
ccccugcugcgggucuc

SEQ ID NO: 9159 - RNA, 17 nt, Homo sapiens
ugcugcgggucucacca

SEQ ID NO: 9160 - RNA, 17 nt, Homo sapiens
cgggucucaccaugggu

SEQ ID NO: 9161 - RNA, 17 nt, Homo sapiens
gucucaccauggguuua

SEQ ID NO: 9162 - RNA, 17 nt, Homo sapiens
caccauggguuuagaac

SEQ ID NO: 9163 - RNA, 17 nt, Homo sapiens
gguuuagaacaaagagc

SEQ ID NO: 9164 - RNA, 17 nt, Homo sapiens
aacaaagagcuucaagc

SEQ ID NO: 9165 - RNA, 17 nt, Homo sapiens
agcuucaagcaauggcc

SEQ ID NO: 9166 - RNA, 17 nt, Homo sapiens
uucaagcaauggcccca

SEQ ID NO: 9167 - RNA, 17 nt, Homo sapiens
aagcaauggccccaucc

SEQ ID NO: 9168 - RNA, 17 nt, Homo sapiens
auggccccauccucaaa

SEQ ID NO: 9169 - RNA, 17 nt, Homo sapiens
ucaaagaaguagcagua

SEQ ID NO: 9170 - RNA, 17 nt, Homo sapiens
aagaaguagcaguaccu

SEQ ID NO: 9171 - RNA, 17 nt, Homo sapiens
aaguagcaguaccuggg

SEQ ID NO: 9172 - RNA, 17 nt, Homo sapiens
guagcaguaccugggga

SEQ ID NO: 9173 - RNA, 17 nt, Homo sapiens
ccuggggagcugacacu

SEQ ID NO: 9174 - RNA, 17 nt, Homo sapiens
gggagcugacacuucug

SEQ ID NO: 9175 - RNA, 17 nt, Homo sapiens
gagcugacacuucugua

SEQ ID NO: 9176 - RNA, 17 nt, Homo sapiens
acacuucuguaaaacua

SEQ ID NO: 9177 - RNA, 17 nt, Homo sapiens
ucuguaaaacuagaaga

SEQ ID NO: 9178 - RNA, 17 nt, Homo sapiens
acuagaagauaaaccag

SEQ ID NO: 9179 - RNA, 17 nt, Homo sapiens
gaagauaaaccaggcaa

SEQ ID NO: 9180 - RNA, 17 nt, Homo sapiens
uaaaccaggcaacguaa

SEQ ID NO: 9181 - RNA, 17 nt, Homo sapiens
accaggcaacguaagug

SEQ ID NO: 9182 - RNA, 17 nt, Homo sapiens
caggcaacguaaguguu

SEQ ID NO: 9183 - RNA, 17 nt, Homo sapiens
caacguaaguguucgag

SEQ ID NO: 9184 - RNA, 17 nt, Homo sapiens
acguaaguguucgaggu

SEQ ID NO: 9185 - RNA, 17 nt, Homo sapiens
uguucgagguguugaag

SEQ ID NO: 9186 - RNA, 17 nt, Homo sapiens
uucgagguguugaagau

SEQ ID NO: 9187 - RNA, 17 nt, Homo sapiens
uguugaagaugggaagg

SEQ ID NO: 9188 - RNA, 17 nt, Homo sapiens
ugggaaggauuugcagg

SEQ ID NO: 9189 - RNA, 17 nt, Homo sapiens
aaggauuugcagggcug

SEQ ID NO: 9190 - RNA, 17 nt, Homo sapiens
uuugcagggcugagucu

SEQ ID NO: 9191 - RNA, 17 nt, Homo sapiens
agggcugagucuaucca

SEQ ID NO: 9192 - RNA, 17 nt, Homo sapiens
cugagucuauccaagag

SEQ ID NO: 9193 - RNA, 17 nt, Homo sapiens
uccaagaggcuuuguuu

SEQ ID NO: 9194 - RNA, 17 nt, Homo sapiens
gaggcuuuguuuaggac

SEQ ID NO: 9195 - RNA, 17 nt, Homo sapiens
uguuuaggacguggguc

SEQ ID NO: 9196 - RNA, 17 nt, Homo sapiens
uuuaggacguggguccc

SEQ ID NO: 9197 - RNA, 17 nt, Homo sapiens
ggacgugggucccaagc

SEQ ID NO: 9198 - RNA, 17 nt, Homo sapiens
ggucccaagccaagccu

SEQ ID NO: 9199 - RNA, 17 nt, Homo sapiens
caagccaagccuuaagu

SEQ ID NO: 9200 - RNA, 17 nt, Homo sapiens
agccuuaaguguggaau

SEQ ID NO: 9201 - RNA, 17 nt, Homo sapiens
ccuuaaguguggaauuc

SEQ ID NO: 9202 - RNA, 17 nt, Homo sapiens
aguguggaauucggauu

SEQ ID NO: 9203 - RNA, 17 nt, Homo sapiens
gaauucggauugauaga

SEQ ID NO: 9204 - RNA, 17 nt, Homo sapiens
ucggauugauagaaagg

SEQ ID NO: 9205 - RNA, 17 nt, Homo sapiens
aaaggaagacuaacguu

SEQ ID NO: 9206 - RNA, 17 nt, Homo sapiens
gaagacuaacguuaccu

SEQ ID NO: 9207 - RNA, 17 nt, Homo sapiens
agacuaacguuaccuug

SEQ ID NO: 9208 - RNA, 17 nt, Homo sapiens
cuaacguuaccuugcuu

SEQ ID NO: 9209 - RNA, 17 nt, Homo sapiens
guuaccuugcuuuggag

SEQ ID NO: 9210 - RNA, 17 nt, Homo sapiens
uuuggagaguacuggag

SEQ ID NO: 9211 - RNA, 17 nt, Homo sapiens
uggagaguacuggagcc

SEQ ID NO: 9212 - RNA, 17 nt, Homo sapiens
guacuggagccugcaaa

SEQ ID NO: 9213 - RNA, 17 nt, Homo sapiens
uggagccugcaaaugca

SEQ ID NO: 9214 - RNA, 17 nt, Homo sapiens
gccugcaaaugcauugu

SEQ ID NO: 9215 - RNA, 17 nt, Homo sapiens
cugcaaaugcauugugu

SEQ ID NO: 9216 - RNA, 17 nt, Homo sapiens
gcaaaugcauuguguuu

SEQ ID NO: 9217 - RNA, 17 nt, Homo sapiens
aaugcauuguguuugcu

SEQ ID NO: 9218 - RNA, 17 nt, Homo sapiens
ugcauuguguuugcucu

SEQ ID NO: 9219 - RNA, 17 nt, Homo sapiens
uuguguuugcucuggug

SEQ ID NO: 9220 - RNA, 17 nt, Homo sapiens
uugcucugguggaggug

SEQ ID NO: 9221 - RNA, 17 nt, Homo sapiens
ugguggaggugggcaug

SEQ ID NO: 9222 - RNA, 17 nt, Homo sapiens
ggaggugggcauggggu

SEQ ID NO: 9223 - RNA, 17 nt, Homo sapiens
aggugggcauggggucu

SEQ ID NO: 9224 - RNA, 17 nt, Homo sapiens
ggcauggggucuguucu

SEQ ID NO: 9225 - RNA, 17 nt, Homo sapiens
uggggucuguucugaaa

SEQ ID NO: 9226 - RNA, 17 nt, Homo sapiens
guucugaaauguaaagg

SEQ ID NO: 9227 - RNA, 17 nt, Homo sapiens
ucugaaauguaaagggu

SEQ ID NO: 9228 - RNA, 17 nt, Homo sapiens
uguaaaggguucagacg

SEQ ID NO: 9229 - RNA, 17 nt, Homo sapiens
ggguucagacgggguuu

SEQ ID NO: 9230 - RNA, 17 nt, Homo sapiens
cagacgggguuucuggu

SEQ ID NO: 9231 - RNA, 17 nt, Homo sapiens
gguuucugguuuuagaa

SEQ ID NO: 9232 - RNA, 17 nt, Homo sapiens
uuuagaagguugcgugu

SEQ ID NO: 9233 - RNA, 17 nt, Homo sapiens
agaagguugcguguucu

SEQ ID NO: 9234 - RNA, 17 nt, Homo sapiens
aagguugcguguucuuc

SEQ ID NO: 9235 - RNA, 17 nt, Homo sapiens
gguugcguguucuucga

SEQ ID NO: 9236 - RNA, 17 nt, Homo sapiens
uucuucgaguugggcua

SEQ ID NO: 9237 - RNA, 17 nt, Homo sapiens
cgaguugggcuaaagua

SEQ ID NO: 9238 - RNA, 17 nt, Homo sapiens
gggcuaaaguagaguuc

SEQ ID NO: 9239 - RNA, 17 nt, Homo sapiens
aaaguagaguucguugu

SEQ ID NO: 9240 - RNA, 17 nt, Homo sapiens
uagaguucguugugcug

SEQ ID NO: 9241 - RNA, 17 nt, Homo sapiens
aguucguugugcuguuu

SEQ ID NO: 9242 - RNA, 17 nt, Homo sapiens
uucguugugcuguuucu

SEQ ID NO: 9243 - RNA, 17 nt, Homo sapiens
guugugcuguuucugac

SEQ ID NO: 9244 - RNA, 17 nt, Homo sapiens
uguuucugacuccuaau

SEQ ID NO: 9245 - RNA, 17 nt, Homo sapiens
gacuccuaaugagaguu

SEQ ID NO: 9246 - RNA, 17 nt, Homo sapiens
uaaugagaguuccuucc

SEQ ID NO: 9247 - RNA, 17 nt, Homo sapiens
ccuuccagaccguuagc

SEQ ID NO: 9248 - RNA, 17 nt, Homo sapiens
uccagaccguuagcugu

SEQ ID NO: 9249 - RNA, 17 nt, Homo sapiens
gaccguuagcugucucc

SEQ ID NO: 9250 - RNA, 17 nt, Homo sapiens
cguuagcugucuccuug

SEQ ID NO: 9251 - RNA, 17 nt, Homo sapiens
gucuccuugccaagccc

SEQ ID NO: 9252 - RNA, 17 nt, Homo sapiens
cuugccaagccccagga

SEQ ID NO: 9253 - RNA, 17 nt, Homo sapiens
ggaagaaaaugaugcag

SEQ ID NO: 9254 - RNA, 17 nt, Homo sapiens
agaaaaugaugcagcuc

SEQ ID NO: 9255 - RNA, 17 nt, Homo sapiens
aaaaugaugcagcucug

SEQ ID NO: 9256 - RNA, 17 nt, Homo sapiens
augaugcagcucuggcu

SEQ ID NO: 9257 - RNA, 17 nt, Homo sapiens
cagcucuggcuccuugu

SEQ ID NO: 9258 - RNA, 17 nt, Homo sapiens
ggcuccuugucucccag

SEQ ID NO: 9259 - RNA, 17 nt, Homo sapiens
ucucccaggcugauccu

SEQ ID NO: 9260 - RNA, 17 nt, Homo sapiens
ccaggcugauccuuuau

SEQ ID NO: 9261 - RNA, 17 nt, Homo sapiens
gauccuuuauucagaau

SEQ ID NO: 9262 - RNA, 17 nt, Homo sapiens
uauucagaauaccacaa

SEQ ID NO: 9263 - RNA, 17 nt, Homo sapiens
uucagaauaccacaaag

SEQ ID NO: 9264 - RNA, 17 nt, Homo sapiens
agaauaccacaaagaaa

SEQ ID NO: 9265 - RNA, 17 nt, Homo sapiens
aagaaaggacauucagc

SEQ ID NO: 9266 - RNA, 17 nt, Homo sapiens
gaaaggacauucagcuc

SEQ ID NO: 9267 - RNA, 17 nt, Homo sapiens
gacauucagcucaaggc

SEQ ID NO: 9268 - RNA, 17 nt, Homo sapiens
agcucaaggcucccugc

SEQ ID NO: 9269 - RNA, 17 nt, Homo sapiens
ggcucccugccguguug

SEQ ID NO: 9270 - RNA, 17 nt, Homo sapiens
ucccugccguguugaag

SEQ ID NO: 9271 - RNA, 17 nt, Homo sapiens
ccugccguguugaagag

SEQ ID NO: 9272 - RNA, 17 nt, Homo sapiens
guugaagaguucugacu

SEQ ID NO: 9273 - RNA, 17 nt, Homo sapiens
gaguucugacugcacaa

SEQ ID NO: 9274 - RNA, 17 nt, Homo sapiens
uucugacugcacaaacc

SEQ ID NO: 9275 - RNA, 17 nt, Homo sapiens
cugacugcacaaaccag

SEQ ID NO: 9276 - RNA, 17 nt, Homo sapiens
cugcacaaaccagcuuc

SEQ ID NO: 9277 - RNA, 17 nt, Homo sapiens
acaaaccagcuucuggu

SEQ ID NO: 9278 - RNA, 17 nt, Homo sapiens
agcuucugguuucuucu

SEQ ID NO: 9279 - RNA, 17 nt, Homo sapiens
cuucuggaaugaauacc

SEQ ID NO: 9280 - RNA, 17 nt, Homo sapiens
uggaaugaauacccuca

SEQ ID NO: 9281 - RNA, 17 nt, Homo sapiens
gaaugaauacccucaua

SEQ ID NO: 9282 - RNA, 17 nt, Homo sapiens
auacccucauaucuguc

SEQ ID NO: 9283 - RNA, 17 nt, Homo sapiens
acccucauaucuguccu

SEQ ID NO: 9284 - RNA, 17 nt, Homo sapiens
ucauaucuguccugaug

SEQ ID NO: 9285 - RNA, 17 nt, Homo sapiens
cuguccugaugugauau

SEQ ID NO: 9286 - RNA, 17 nt, Homo sapiens
guccugaugugauaugu

SEQ ID NO: 9287 - RNA, 17 nt, Homo sapiens
cugaugugauaugucug

SEQ ID NO: 9288 - RNA, 17 nt, Homo sapiens
gaugugauaugucugag

SEQ ID NO: 9289 - RNA, 17 nt, Homo sapiens
ugugauaugucugagac

SEQ ID NO: 9290 - RNA, 17 nt, Homo sapiens
ugucugagacugaaugc

SEQ ID NO: 9291 - RNA, 17 nt, Homo sapiens
gagacugaaugcgggag

SEQ ID NO: 9292 - RNA, 17 nt, Homo sapiens
gacugaaugcgggaggu

SEQ ID NO: 9293 - RNA, 17 nt, Homo sapiens
ugcgggagguucaaugu

SEQ ID NO: 9294 - RNA, 17 nt, Homo sapiens
gagguucaaugugaagc

SEQ ID NO: 9295 - RNA, 17 nt, Homo sapiens
gguucaaugugaagcug

SEQ ID NO: 9296 - RNA, 17 nt, Homo sapiens
aaugugaagcugugugu

SEQ ID NO: 9297 - RNA, 17 nt, Homo sapiens
gugaagcuguguguggu

SEQ ID NO: 9298 - RNA, 17 nt, Homo sapiens
gaagcuguguguggugu

SEQ ID NO: 9299 - RNA, 17 nt, Homo sapiens
agcugugugugguguca

SEQ ID NO: 9300 - RNA, 17 nt, Homo sapiens
uguguguggugucaaag

SEQ ID NO: 9301 - RNA, 17 nt, Homo sapiens
uguguggugucaaaguu

SEQ ID NO: 9302 - RNA, 17 nt, Homo sapiens
gugucaaaguuucagga

SEQ ID NO: 9303 - RNA, 17 nt, Homo sapiens
caggaaggauuuuaccc

SEQ ID NO: 9304 - RNA, 17 nt, Homo sapiens
aggauuuuacccuuuug

SEQ ID NO: 9305 - RNA, 17 nt, Homo sapiens
acccuuuuguucuuccc

SEQ ID NO: 9306 - RNA, 17 nt, Homo sapiens
uucccccuguccccaac

SEQ ID NO: 9307 - RNA, 17 nt, Homo sapiens
uguccccaacccacucu

SEQ ID NO: 9308 - RNA, 17 nt, Homo sapiens
cccaacccacucucacc

SEQ ID NO: 9309 - RNA, 17 nt, Homo sapiens
ccacucucaccccgcaa

SEQ ID NO: 9310 - RNA, 17 nt, Homo sapiens
cucaccccgcaacccau

SEQ ID NO: 9311 - RNA, 17 nt, Homo sapiens
accccgcaacccaucag

SEQ ID NO: 9312 - RNA, 17 nt, Homo sapiens
cgcaacccaucaguauu

SEQ ID NO: 9313 - RNA, 17 nt, Homo sapiens
acccaucaguauuuuag

SEQ ID NO: 9314 - RNA, 17 nt, Homo sapiens
ccaucaguauuuuaguu

SEQ ID NO: 9315 - RNA, 17 nt, Homo sapiens
guauuuuaguuauuugg

SEQ ID NO: 9316 - RNA, 17 nt, Homo sapiens
uuuuaguuauuuggccu

SEQ ID NO: 9317 - RNA, 17 nt, Homo sapiens
guuauuuggccucuacu

SEQ ID NO: 9318 - RNA, 17 nt, Homo sapiens
uggccucuacuccagua

SEQ ID NO: 9319 - RNA, 17 nt, Homo sapiens
cuacuccaguaaaccug

SEQ ID NO: 9320 - RNA, 17 nt, Homo sapiens
uccaguaaaccugauug

SEQ ID NO: 9321 - RNA, 17 nt, Homo sapiens
uaaaccugauuggguuu

SEQ ID NO: 9322 - RNA, 17 nt, Homo sapiens
cugauuggguuuguuca

SEQ ID NO: 9323 - RNA, 17 nt, Homo sapiens
uuggguuuguucacucu

SEQ ID NO: 9324 - RNA, 17 nt, Homo sapiens
guuuguucacucucuga

SEQ ID NO: 9325 - RNA, 17 nt, Homo sapiens
cucucugaaugauuauu

SEQ ID NO: 9326 - RNA, 17 nt, Homo sapiens
ucugaaugauuauuagc

SEQ ID NO: 9327 - RNA, 17 nt, Homo sapiens
gaaugauuauuagccag

SEQ ID NO: 9328 - RNA, 17 nt, Homo sapiens
gauuauuagccagacuu

SEQ ID NO: 9329 - RNA, 17 nt, Homo sapiens
uuagccagacuucaaaa

SEQ ID NO: 9330 - RNA, 17 nt, Homo sapiens
acuucaaaauuauuuua

SEQ ID NO: 9331 - RNA, 17 nt, Homo sapiens
ucaaaauuauuuuauag

SEQ ID NO: 9332 - RNA, 17 nt, Homo sapiens
auuauuuuauagcccaa

SEQ ID NO: 9333 - RNA, 17 nt, Homo sapiens
auuuuauagcccaaauu

SEQ ID NO: 9334 - RNA, 17 nt, Homo sapiens
uagcccaaauuauaaca

SEQ ID NO: 9335 - RNA, 17 nt, Homo sapiens
cccaaauuauaacaucu

SEQ ID NO: 9336 - RNA, 17 nt, Homo sapiens
aaauuauaacaucuauu

SEQ ID NO: 9337 - RNA, 17 nt, Homo sapiens
auuauaacaucuauugu

SEQ ID NO: 9338 - RNA, 17 nt, Homo sapiens
uaacaucuauuguauua

SEQ ID NO: 9339 - RNA, 17 nt, Homo sapiens
caucuauuguauuauuu

SEQ ID NO: 9340 - RNA, 17 nt, Homo sapiens
ucuauuguauuauuuag

SEQ ID NO: 9341 - RNA, 17 nt, Homo sapiens
auuguauuauuuagacu

SEQ ID NO: 9342 - RNA, 17 nt, Homo sapiens
uuauuuagacuuuuaac

SEQ ID NO: 9343 - RNA, 17 nt, Homo sapiens
gacuuuuaacauauaga

SEQ ID NO: 9344 - RNA, 17 nt, Homo sapiens
cuuuuaacauauagagc

SEQ ID NO: 9345 - RNA, 17 nt, Homo sapiens
uuuaacauauagagcua

SEQ ID NO: 9346 - RNA, 17 nt, Homo sapiens
cauauagagcuauuucu

SEQ ID NO: 9347 - RNA, 17 nt, Homo sapiens
auagagcuauuucuacu

SEQ ID NO: 9348 - RNA, 17 nt, Homo sapiens
cuauuucuacugauuuu

SEQ ID NO: 9349 - RNA, 17 nt, Homo sapiens
uucuacugauuuuugcc

SEQ ID NO: 9350 - RNA, 17 nt, Homo sapiens
ugauuuuugcccuuguu

SEQ ID NO: 9351 - RNA, 17 nt, Homo sapiens
uugcccuuguucugucc

SEQ ID NO: 9352 - RNA, 17 nt, Homo sapiens
cuuguucuguccuuuuu

SEQ ID NO: 9353 - RNA, 17 nt, Homo sapiens
aaaagaaaauguguuuu

SEQ ID NO: 9354 - RNA, 17 nt, Homo sapiens
aagaaaauguguuuuuu

SEQ ID NO: 9355 - RNA, 17 nt, Homo sapiens
gaaaauguguuuuuugu

SEQ ID NO: 9356 - RNA, 17 nt, Homo sapiens
uguuuuuuguuugguac

SEQ ID NO: 9357 - RNA, 17 nt, Homo sapiens
uuuguuugguaccauag

SEQ ID NO: 9358 - RNA, 17 nt, Homo sapiens
uguuugguaccauagug

SEQ ID NO: 9359 - RNA, 17 nt, Homo sapiens
uugguaccauaguguga

SEQ ID NO: 9360 - RNA, 17 nt, Homo sapiens
guaccauagugugaaau

SEQ ID NO: 9361 - RNA, 17 nt, Homo sapiens
accauagugugaaaugc

SEQ ID NO: 9362 - RNA, 17 nt, Homo sapiens
agugugaaaugcuggga

SEQ ID NO: 9363 - RNA, 17 nt, Homo sapiens
ugugaaaugcugggaac

SEQ ID NO: 9364 - RNA, 17 nt, Homo sapiens
ugcugggaacaaugacu

SEQ ID NO: 9365 - RNA, 17 nt, Homo sapiens
ugggaacaaugacuaua

SEQ ID NO: 9366 - RNA, 17 nt, Homo sapiens
gaacaaugacuauaaga

SEQ ID NO: 9367 - RNA, 17 nt, Homo sapiens
caaugacuauaagacau

SEQ ID NO: 9368 - RNA, 17 nt, Homo sapiens
acuauaagacaugcuau

SEQ ID NO: 9369 - RNA, 17 nt, Homo sapiens
uauaagacaugcuaugg

SEQ ID NO: 9370 - RNA, 17 nt, Homo sapiens
uaagacaugcuauggca

SEQ ID NO: 9371 - RNA, 17 nt, Homo sapiens
gacaugcuauggcacau

SEQ ID NO: 9372 - RNA, 17 nt, Homo sapiens
augcuauggcacauaua

SEQ ID NO: 9373 - RNA, 17 nt, Homo sapiens
gcuauggcacauauauu

SEQ ID NO: 9374 - RNA, 17 nt, Homo sapiens
uauggcacauauauuua

SEQ ID NO: 9375 - RNA, 17 nt, Homo sapiens
uggcacauauauuuaua

SEQ ID NO: 9376 - RNA, 17 nt, Homo sapiens
gcacauauauuuauagu

SEQ ID NO: 9377 - RNA, 17 nt, Homo sapiens
auauauuuauagucugu

SEQ ID NO: 9378 - RNA, 17 nt, Homo sapiens
uauuuauagucuguuua

SEQ ID NO: 9379 - RNA, 17 nt, Homo sapiens
uauagucuguuuaugua

SEQ ID NO: 9380 - RNA, 17 nt, Homo sapiens
gucuguuuauguagaaa

SEQ ID NO: 9381 - RNA, 17 nt, Homo sapiens
cuguuuauguagaaaca

SEQ ID NO: 9382 - RNA, 17 nt, Homo sapiens
auguagaaacaaaugua

SEQ ID NO: 9383 - RNA, 17 nt, Homo sapiens
agaaacaaauguaauau

SEQ ID NO: 9384 - RNA, 17 nt, Homo sapiens
aaacaaauguaauauau

SEQ ID NO: 9385 - RNA, 17 nt, Homo sapiens
caaauguaauauauuaa

SEQ ID NO: 9386 - RNA, 17 nt, Homo sapiens
aauguaauauauuaaag

SEQ ID NO: 9387 - RNA, 17 nt, Homo sapiens
uguaauauauuaaagcc

SEQ ID NO: 9388 - RNA, 17 nt, Homo sapiens
auauuaaagccuuauau

SEQ ID NO: 9389 - RNA, 17 nt, Homo sapiens
aaagccuuauauauaau

SEQ ID NO: 9390 - RNA, 17 nt, Homo sapiens
agccuuauauauaauga

SEQ ID NO: 9391 - RNA, 17 nt, Homo sapiens
ccuuauauauaaugaac

SEQ ID NO: 9392 - RNA, 17 nt, Homo sapiens
uauauauaaugaacuuu

SEQ ID NO: 9393 - RNA, 17 nt, Homo sapiens
uauaaugaacuuuguac

SEQ ID NO: 9394 - RNA, 17 nt, Homo sapiens
ugaacuuuguacuauuc

SEQ ID NO: 9395 - RNA, 17 nt, Homo sapiens
aacuuuguacuauucac

SEQ ID NO: 9396 - RNA, 17 nt, Homo sapiens
uuuguacuauucacauu

SEQ ID NO: 9397 - RNA, 17 nt, Homo sapiens
uacuauucacauuuugu

SEQ ID NO: 9398 - RNA, 17 nt, Homo sapiens
cuauucacauuuuguau

SEQ ID NO: 9399 - RNA, 17 nt, Homo sapiens
cacauuuuguaucagua

SEQ ID NO: 9400 - RNA, 17 nt, Homo sapiens
cauuuuguaucaguauu

SEQ ID NO: 9401 - RNA, 17 nt, Homo sapiens
uuguaucaguauuaugu

SEQ ID NO: 9402 - RNA, 17 nt, Homo sapiens
guaucaguauuauguag

SEQ ID NO: 9403 - RNA, 17 nt, Homo sapiens
ucaguauuauguagcau

SEQ ID NO: 9404 - RNA, 17 nt, Homo sapiens
aguauuauguagcauaa

SEQ ID NO: 9405 - RNA, 17 nt, Homo sapiens
auuauguagcauaacaa

SEQ ID NO: 9406 - RNA, 17 nt, Homo sapiens
uauguagcauaacaaag

SEQ ID NO: 9407 - RNA, 17 nt, Homo sapiens
guagcauaacaaagguc

SEQ ID NO: 9408 - RNA, 17 nt, Homo sapiens
uaacaaaggucauaaug

SEQ ID NO: 9409 - RNA, 17 nt, Homo sapiens
caaaggucauaaugcuu

SEQ ID NO: 9410 - RNA, 17 nt, Homo sapiens
aggucauaaugcuuuca

SEQ ID NO: 9411 - RNA, 17 nt, Homo sapiens
gucauaaugcuuucagc

SEQ ID NO: 9412 - RNA, 17 nt, Homo sapiens
ugcuuucagcaauugau

SEQ ID NO: 9413 - RNA, 17 nt, Homo sapiens
uuucagcaauugauguc

SEQ ID NO: 9414 - RNA, 17 nt, Homo sapiens
agcaauugaugucauuu

SEQ ID NO: 9415 - RNA, 17 nt, Homo sapiens
caauugaugucauuuua

SEQ ID NO: 9416 - RNA, 17 nt, Homo sapiens
uugaugucauuuuauua

SEQ ID NO: 9417 - RNA, 17 nt, Homo sapiens
gucauuuuauuaaagaa

SEQ ID NO: 9418 - RNA, 17 nt, Homo sapiens
auuaaagaacauugaaa

SEQ ID NO: 9419 - RNA, 17 nt, Homo sapiens
uaaagaacauugaaaaa

SEQ ID NO: 9420 - RNA, 38 nt, Artificial Sequence
  Description of Artificial Sequence:  Enzymatic Nucleic Acid
gccgagagcugaugaggccguuaggccgaaaguguccg

SEQ ID NO: 9421 - RNA, 38 nt, Artificial Sequence
  Description of Artificial Sequence:  Enzymatic Nucleic Acid
ggagccgacugaugaggccguuaggccgaaaggagugu

SEQ ID NO: 9422 - RNA, 38 nt, Artificial Sequence
  Description of Artificial Sequence:  Enzymatic Nucleic Acid
gaggagcccugaugaggccguuaggccgaaagaggagu

SEQ ID NO: 9423 - RNA, 38 nt, Artificial Sequence
  Description of Artificial Sequence:  Enzymatic Nucleic Acid
ccggggagcugaugaggccguuaggccgaaagccgaga

SEQ ID NO: 9424 - RNA, 38 nt, Artificial Sequence
  Description of Artificial Sequence:  Enzymatic Nucleic Acid
cugccgggcugaugaggccguuaggccgaaaggagccg

SEQ ID NO: 9425 - RNA, 38 nt, Artificial Sequence
  Description of Artificial Sequence:  Enzymatic Nucleic Acid
cccgcucccugaugaggccguuaggccgaaagccgccg

SEQ ID NO: 9426 - RNA, 38 nt, Artificial Sequence
  Description of Artificial Sequence:  Enzymatic Nucleic Acid
gagccccgcugaugaggccguuaggccgaaagcccgcu

SEQ ID NO: 9427 - RNA, 38 nt, Artificial Sequence
  Description of Artificial Sequence:  Enzymatic Nucleic Acid
cugcaccccugaugaggccguuaggccgaaagccccgg

SEQ ID NO: 9428 - RNA, 38 nt, Artificial Sequence
  Description of Artificial Sequence:  Enzymatic Nucleic Acid
ccccgggucugaugaggccguuaggccgaaauccucgc

SEQ ID NO: 9429 - RNA, 38 nt, Artificial Sequence
  Description of Artificial Sequence:  Enzymatic Nucleic Acid
uccccgggcugaugaggccguuaggccgaaaauccucg

SEQ ID NO: 9430 - RNA, 38 nt, Artificial Sequence
  Description of Artificial Sequence:  Enzymatic Nucleic Acid
caggagaccugaugaggccguuaggccgaaaccacuuc

SEQ ID NO: 9431 - RNA, 38 nt, Artificial Sequence
  Description of Artificial Sequence:  Enzymatic Nucleic Acid
agccaggacugaugaggccguuaggccgaaacaaccac

SEQ ID NO: 9432 - RNA, 38 nt, Artificial Sequence
  Description of Artificial Sequence:  Enzymatic Nucleic Acid
ccagccagcugaugaggccguuaggccgaaagacaacc

SEQ ID NO: 9433 - RNA, 38 nt, Artificial Sequence
  Description of Artificial Sequence:  Enzymatic Nucleic Acid
cgcgcccucugaugaggccguuaggccgaaagcgcccg

SEQ ID NO: 9434 - RNA, 38 nt, Artificial Sequence
  Description of Artificial Sequence:  Enzymatic Nucleic Acid
ggccgccacugaugaggccguuaggccgaaaguccguc

SEQ ID NO: 9435 - RNA, 38 nt, Artificial Sequence
  Description of Artificial Sequence:  Enzymatic Nucleic Acid
cggccaaccugaugaggccguuaggccgaaacccggcc

SEQ ID NO: 9436 - RNA, 38 nt, Artificial Sequence
  Description of Artificial Sequence:  Enzymatic Nucleic Acid
ccccggcccugaugaggccguuaggccgaaacgacccg

SEQ ID NO: 9437 - RNA, 38 nt, Artificial Sequence
  Description of Artificial Sequence:  Enzymatic Nucleic Acid
gugagcgccugaugaggccguuaggccgaaacgcggcc

SEQ ID NO: 9438 - RNA, 38 nt, Artificial Sequence
  Description of Artificial Sequence:  Enzymatic Nucleic Acid
accauggucugaugaggccguuaggccgaaagcgcgac

SEQ ID NO: 9439 - RNA, 38 nt, Artificial Sequence
  Description of Artificial Sequence:  Enzymatic Nucleic Acid
caguagcucugaugaggccguuaggccgaaaccauggu

SEQ ID NO: 9440 - RNA, 38 nt, Artificial Sequence
  Description of Artificial Sequence:  Enzymatic Nucleic Acid
ugucccagcugaugaggccguuaggccgaaagcugacc

SEQ ID NO: 9441 - RNA, 38 nt, Artificial Sequence
  Description of Artificial Sequence:  Enzymatic Nucleic Acid
cacagcagcugaugaggccguuaggccgaaaccccggu

SEQ ID NO: 9442 - RNA, 38 nt, Artificial Sequence
  Description of Artificial Sequence:  Enzymatic Nucleic Acid
agacagcucugaugaggccguuaggccgaaagcagcgc

SEQ ID NO: 9443 - RNA, 38 nt, Artificial Sequence
  Description of Artificial Sequence:  Enzymatic Nucleic Acid
gagaagcacugaugaggccguuaggccgaaacagcuga

SEQ ID NO: 9444 - RNA, 38 nt, Artificial Sequence
  Description of Artificial Sequence:  Enzymatic Nucleic Acid
ccugugagcugaugaggccguuaggccgaaagcagaca

SEQ ID NO: 9445 - RNA, 38 nt, Artificial Sequence
  Description of Artificial Sequence:  Enzymatic Nucleic Acid
uccugugacugaugaggccguuaggccgaaaagcagac

SEQ ID NO: 9446 - RNA, 38 nt, Artificial Sequence
  Description of Artificial Sequence:  Enzymatic Nucleic Acid
gauccugucugaugaggccguuaggccgaaagaagcag

SEQ ID NO: 9447 - RNA, 38 nt, Artificial Sequence
  Description of Artificial Sequence:  Enzymatic Nucleic Acid
cugaacuacugaugaggccguuaggccgaaauccugug

SEQ ID NO: 9448 - RNA, 38 nt, Artificial Sequence
  Description of Artificial Sequence:  Enzymatic Nucleic Acid
accugaaccugaugaggccguuaggccgaaagauccug

SEQ ID NO: 9449 - RNA, 38 nt, Artificial Sequence
  Description of Artificial Sequence:  Enzymatic Nucleic Acid
ugaaccugcugaugaggccguuaggccgaaacuagauc

SEQ ID NO: 9450 - RNA, 38 nt, Artificial Sequence
  Description of Artificial Sequence:  Enzymatic Nucleic Acid
uugaaccucugaugaggccguuaggccgaaaacuagau

SEQ ID NO: 9451 - RNA, 38 nt, Artificial Sequence
  Description of Artificial Sequence:  Enzymatic Nucleic Acid
uaauuuugcugaugaggccguuaggccgaaaccugaac

SEQ ID NO: 9452 - RNA, 38 nt, Artificial Sequence
  Description of Artificial Sequence:  Enzymatic Nucleic Acid
uuaauuuucugaugaggccguuaggccgaaaaccugaa

SEQ ID NO: 9453 - RNA, 38 nt, Artificial Sequence
  Description of Artificial Sequence:  Enzymatic Nucleic Acid
gaucuuuucugaugaggccguuaggccgaaauuuugaa

SEQ ID NO: 9454 - RNA, 38 nt, Artificial Sequence
  Description of Artificial Sequence:  Enzymatic Nucleic Acid
ggaucuuucugaugaggccguuaggccgaaaauuuuga

SEQ ID NO: 9455 - RNA, 38 nt, Artificial Sequence
  Description of Artificial Sequence:  Enzymatic Nucleic Acid
caguucagcugaugaggccguuaggccgaaaucuuuua

SEQ ID NO: 9456 - RNA, 38 nt, Artificial Sequence
  Description of Artificial Sequence:  Enzymatic Nucleic Acid
gccuuuuacugaugaggccguuaggccgaaacucaguu

SEQ ID NO: 9457 - RNA, 38 nt, Artificial Sequence
  Description of Artificial Sequence:  Enzymatic Nucleic Acid
ugccuuuucugaugaggccguuaggccgaaaacucagu

SEQ ID NO: 9458 - RNA, 38 nt, Artificial Sequence
  Description of Artificial Sequence:  Enzymatic Nucleic Acid
gugccuuucugaugaggccguuaggccgaaaaacucag

SEQ ID NO: 9459 - RNA, 38 nt, Artificial Sequence
  Description of Artificial Sequence:  Enzymatic Nucleic Acid
gcuugcaucugaugaggccguuaggccgaaaugugcug

SEQ ID NO: 9460 - RNA, 38 nt, Artificial Sequence
  Description of Artificial Sequence:  Enzymatic Nucleic Acid
gcauuggacugaugaggccguuaggccgaaaugcagug

SEQ ID NO: 9461 - RNA, 38 nt, Artificial Sequence
  Description of Artificial Sequence:  Enzymatic Nucleic Acid
cugcauugcugaugaggccguuaggccgaaagaugcag

SEQ ID NO: 9462 - RNA, 38 nt, Artificial Sequence
  Description of Artificial Sequence:  Enzymatic Nucleic Acid
agaccauucugaugaggccguuaggccgaaaugggcug

SEQ ID NO: 9463 - RNA, 38 nt, Artificial Sequence
  Description of Artificial Sequence:  Enzymatic Nucleic Acid
caggcaaacugaugaggccguuaggccgaaaccauuua

SEQ ID NO: 9464 - RNA, 38 nt, Artificial Sequence
  Description of Artificial Sequence:  Enzymatic Nucleic Acid
uucaggcacugaugaggccguuaggccgaaagaccauu

SEQ ID NO: 9465 - RNA, 38 nt, Artificial Sequence
  Description of Artificial Sequence:  Enzymatic Nucleic Acid
uuucaggccugaugaggccguuaggccgaaaagaccau

SEQ ID NO: 9466 - RNA, 38 nt, Artificial Sequence
  Description of Artificial Sequence:  Enzymatic Nucleic Acid
gcuuuccucugaugaggccguuaggccgaaacucacca

SEQ ID NO: 9467 - RNA, 38 nt, Artificial Sequence
  Description of Artificial Sequence:  Enzymatic Nucleic Acid
gauuuagucugaugaggccguuaggccgaaaugcucag

SEQ ID NO: 9468 - RNA, 38 nt, Artificial Sequence
  Description of Artificial Sequence:  Enzymatic Nucleic Acid
ggcagauucugaugaggccguuaggccgaaaguuaugc

SEQ ID NO: 9469 - RNA, 38 nt, Artificial Sequence
  Description of Artificial Sequence:  Enzymatic Nucleic Acid
cacaggcacugaugaggccguuaggccgaaauuuaguu

SEQ ID NO: 9470 - RNA, 38 nt, Artificial Sequence
  Description of Artificial Sequence:  Enzymatic Nucleic Acid
uacugcagcugaugaggccguuaggccgaaauuguuug

SEQ ID NO: 9471 - RNA, 38 nt, Artificial Sequence
  Description of Artificial Sequence:  Enzymatic Nucleic Acid
guacugcacugaugaggccguuaggccgaaaauuguuu

SEQ ID NO: 9472 - RNA, 38 nt, Artificial Sequence
  Description of Artificial Sequence:  Enzymatic Nucleic Acid
gguuaaagcugaugaggccguuaggccgaaacugcaga

SEQ ID NO: 9473 - RNA, 38 nt, Artificial Sequence
  Description of Artificial Sequence:  Enzymatic Nucleic Acid
caagguuacugaugaggccguuaggccgaaaguacugc

SEQ ID NO: 9474 - RNA, 38 nt, Artificial Sequence
  Description of Artificial Sequence:  Enzymatic Nucleic Acid
ucaagguucugaugaggccguuaggccgaaaaguacug

SEQ ID NO: 9475 - RNA, 38 nt, Artificial Sequence
  Description of Artificial Sequence:  Enzymatic Nucleic Acid
uucaaggucugaugaggccguuaggccgaaaaaguacu

SEQ ID NO: 9476 - RNA, 38 nt, Artificial Sequence
  Description of Artificial Sequence:  Enzymatic Nucleic Acid
cuguguuccugaugaggccguuaggccgaaagguuaaa

SEQ ID NO: 9477 - RNA, 38 nt, Artificial Sequence
  Description of Artificial Sequence:  Enzymatic Nucleic Acid
guuugcuucugaugaggccguuaggccgaaagcugugu

SEQ ID NO: 9478 - RNA, 38 nt, Artificial Sequence
  Description of Artificial Sequence:  Enzymatic Nucleic Acid
agcuguagcugaugaggccguuaggccgaaagccagug

SEQ ID NO: 9479 - RNA, 38 nt, Artificial Sequence
  Description of Artificial Sequence:  Enzymatic Nucleic Acid
cagcuguacugaugaggccguuaggccgaaaagccagu

SEQ ID NO: 9480 - RNA, 38 nt, Artificial Sequence
  Description of Artificial Sequence:  Enzymatic Nucleic Acid
ugcagcugcugaugaggccguuaggccgaaagaagcca

SEQ ID NO: 9481 - RNA, 38 nt, Artificial Sequence
  Description of Artificial Sequence:  Enzymatic Nucleic Acid
cagcuagacugaugaggccguuaggccgaaauuugcag

SEQ ID NO: 9482 - RNA, 38 nt, Artificial Sequence
  Description of Artificial Sequence:  Enzymatic Nucleic Acid
uacagcuacugaugaggccguuaggccgaaauauuugc

SEQ ID NO: 9483 - RNA, 38 nt, Artificial Sequence
  Description of Artificial Sequence:  Enzymatic Nucleic Acid
gguacagccugaugaggccguuaggccgaaagauauuu

SEQ ID NO: 9484 - RNA, 38 nt, Artificial Sequence
  Description of Artificial Sequence:  Enzymatic Nucleic Acid
gaaguaggcugaugaggccguuaggccgaaacagcuag

SEQ ID NO: 9485 - RNA, 38 nt, Artificial Sequence
  Description of Artificial Sequence:  Enzymatic Nucleic Acid
cuuugaagcugaugaggccguuaggccgaaagguacag

SEQ ID NO: 9486 - RNA, 38 nt, Artificial Sequence
  Description of Artificial Sequence:  Enzymatic Nucleic Acid
cuucuuugcugaugaggccguuaggccgaaaguaggua

SEQ ID NO: 9487 - RNA, 38 nt, Artificial Sequence
  Description of Artificial Sequence:  Enzymatic Nucleic Acid
ucuucuuucugaugaggccguuaggccgaaaaguaggu

SEQ ID NO: 9488 - RNA, 38 nt, Artificial Sequence
  Description of Artificial Sequence:  Enzymatic Nucleic Acid
agauugcacugaugaggccguuaggccgaaauucuguu

SEQ ID NO: 9489 - RNA, 38 nt, Artificial Sequence
  Description of Artificial Sequence:  Enzymatic Nucleic Acid
aauauauacugaugaggccguuaggccgaaauugcaga

SEQ ID NO: 9490 - RNA, 38 nt, Artificial Sequence
  Description of Artificial Sequence:  Enzymatic Nucleic Acid
uaaauauacugaugaggccguuaggccgaaagauugca

SEQ ID NO: 9491 - RNA, 38 nt, Artificial Sequence
  Description of Artificial Sequence:  Enzymatic Nucleic Acid
aauaaauacugaugaggccguuaggccgaaauagauug

SEQ ID NO: 9492 - RNA, 38 nt, Artificial Sequence
  Description of Artificial Sequence:  Enzymatic Nucleic Acid
cuaauaaacugaugaggccguuaggccgaaauauagau

SEQ ID NO: 9493 - RNA, 38 nt, Artificial Sequence
  Description of Artificial Sequence:  Enzymatic Nucleic Acid
cacuaauacugaugaggccguuaggccgaaauauauag

SEQ ID NO: 9494 - RNA, 38 nt, Artificial Sequence
  Description of Artificial Sequence:  Enzymatic Nucleic Acid
ucacuaaucugaugaggccguuaggccgaaaauauaua

SEQ ID NO: 9495 - RNA, 38 nt, Artificial Sequence
  Description of Artificial Sequence:  Enzymatic Nucleic Acid
aucacuaacugaugaggccguuaggccgaaaaauauau

SEQ ID NO: 9496 - RNA, 38 nt, Artificial Sequence
  Description of Artificial Sequence:  Enzymatic Nucleic Acid
guaucacucugaugaggccguuaggccgaaauaaauau

SEQ ID NO: 9497 - RNA, 38 nt, Artificial Sequence
  Description of Artificial Sequence:  Enzymatic Nucleic Acid
uguaucaccugaugaggccguuaggccgaaaauaaaua

SEQ ID NO: 9498 - RNA, 38 nt, Artificial Sequence
  Description of Artificial Sequence:  Enzymatic Nucleic Acid
ucuaccugcugaugaggccguuaggccgaaaucacuaa

SEQ ID NO: 9499 - RNA, 38 nt, Artificial Sequence
  Description of Artificial Sequence:  Enzymatic Nucleic Acid
gaaagguccugaugaggccguuaggccgaaaccuguau

SEQ ID NO: 9500 - RNA, 38 nt, Artificial Sequence
  Description of Artificial Sequence:  Enzymatic Nucleic Acid
cucuacgacugaugaggccguuaggccgaaaggucuac

SEQ ID NO: 9501 - RNA, 38 nt, Artificial Sequence
  Description of Artificial Sequence:  Enzymatic Nucleic Acid
ucucuacgcugaugaggccguuaggccgaaaaggucua

SEQ ID NO: 9502 - RNA, 38 nt, Artificial Sequence
  Description of Artificial Sequence:  Enzymatic Nucleic Acid
aucucuaccugaugaggccguuaggccgaaaaaggucu

SEQ ID NO: 9503 - RNA, 38 nt, Artificial Sequence
  Description of Artificial Sequence:  Enzymatic Nucleic Acid
uacaucuccugaugaggccguuaggccgaaacgaaagg

SEQ ID NO: 9504 - RNA, 38 nt, Artificial Sequence
  Description of Artificial Sequence:  Enzymatic Nucleic Acid
uuucacugcugaugaggccguuaggccgaaacaucucu

SEQ ID NO: 9505 - RNA, 38 nt, Artificial Sequence
  Description of Artificial Sequence:  Enzymatic Nucleic Acid
auuucgggcugaugaggccguuaggccgaaauuucacu

SEQ ID NO: 9506 - RNA, 38 nt, Artificial Sequence
  Description of Artificial Sequence:  Enzymatic Nucleic Acid
auguguaucugaugaggccguuaggccgaaauuucggg

SEQ ID NO: 9507 - RNA, 38 nt, Artificial Sequence
  Description of Artificial Sequence:  Enzymatic Nucleic Acid
cauguguacugaugaggccguuaggccgaaaauuucgg

SEQ ID NO: 9508 - RNA, 38 nt, Artificial Sequence
  Description of Artificial Sequence:  Enzymatic Nucleic Acid
gucaugugcugaugaggccguuaggccgaaauaauuuc

SEQ ID NO: 9509 - RNA, 38 nt, Artificial Sequence
  Description of Artificial Sequence:  Enzymatic Nucleic Acid
ggaaugaccugaugaggccguuaggccgaaagcucccu

SEQ ID NO: 9510 - RNA, 38 nt, Artificial Sequence
  Description of Artificial Sequence:  Enzymatic Nucleic Acid
cagggaaucugaugaggccguuaggccgaaacgagcuc

SEQ ID NO: 9511 - RNA, 38 nt, Artificial Sequence
  Description of Artificial Sequence:  Enzymatic Nucleic Acid
cggcagggcugaugaggccguuaggccgaaaugacgag

SEQ ID NO: 9512 - RNA, 38 nt, Artificial Sequence
  Description of Artificial Sequence:  Enzymatic Nucleic Acid
ccggcaggcugaugaggccguuaggccgaaaaugacga

SEQ ID NO: 9513 - RNA, 38 nt, Artificial Sequence
  Description of Artificial Sequence:  Enzymatic Nucleic Acid
ggugacgucugaugaggccguuaggccgaaacccggca

SEQ ID NO: 9514 - RNA, 38 nt, Artificial Sequence
  Description of Artificial Sequence:  Enzymatic Nucleic Acid
aggugacgcugaugaggccguuaggccgaaaacccggc

SEQ ID NO: 9515 - RNA, 38 nt, Artificial Sequence
  Description of Artificial Sequence:  Enzymatic Nucleic Acid
uguuaggucugaugaggccguuaggccgaaacguaacc

SEQ ID NO: 9516 - RNA, 38 nt, Artificial Sequence
  Description of Artificial Sequence:  Enzymatic Nucleic Acid
agugaugucugaugaggccguuaggccgaaaggugacg

SEQ ID NO: 9517 - RNA, 38 nt, Artificial Sequence
  Description of Artificial Sequence:  Enzymatic Nucleic Acid
guaacagucugaugaggccguuaggccgaaauguuagg

SEQ ID NO: 9518 - RNA, 38 nt, Artificial Sequence
  Description of Artificial Sequence:  Enzymatic Nucleic Acid
uuuaaagucugaugaggccguuaggccgaaacagugau

SEQ ID NO: 9519 - RNA, 38 nt, Artificial Sequence
  Description of Artificial Sequence:  Enzymatic Nucleic Acid
uuuuaaagcugaugaggccguuaggccgaaaacaguga

SEQ ID NO: 9520 - RNA, 38 nt, Artificial Sequence
  Description of Artificial Sequence:  Enzymatic Nucleic Acid
cuuuuuuacugaugaggccguuaggccgaaaguaacag

SEQ ID NO: 9521 - RNA, 38 nt, Artificial Sequence
  Description of Artificial Sequence:  Enzymatic Nucleic Acid
acuuuuuucugaugaggccguuaggccgaaaaguaaca

SEQ ID NO: 9522 - RNA, 38 nt, Artificial Sequence
  Description of Artificial Sequence:  Enzymatic Nucleic Acid
aacuuuuucugaugaggccguuaggccgaaaaaguaac

SEQ ID NO: 9523 - RNA, 38 nt, Artificial Sequence
  Description of Artificial Sequence:  Enzymatic Nucleic Acid
caaguggacugaugaggccguuaggccgaaacuuuuuu

SEQ ID NO: 9524 - RNA, 38 nt, Artificial Sequence
  Description of Artificial Sequence:  Enzymatic Nucleic Acid
ucaaguggcugaugaggccguuaggccgaaaacuuuuu

SEQ ID NO: 9525 - RNA, 38 nt, Artificial Sequence
  Description of Artificial Sequence:  Enzymatic Nucleic Acid
gucaagugcugaugaggccguuaggccgaaaaacuuuu

SEQ ID NO: 9526 - RNA, 38 nt, Artificial Sequence
  Description of Artificial Sequence:  Enzymatic Nucleic Acid
aaaguguccugaugaggccguuaggccgaaaguggaaa

SEQ ID NO: 9527 - RNA, 38 nt, Artificial Sequence
  Description of Artificial Sequence:  Enzymatic Nucleic Acid
agggaucacugaugaggccguuaggccgaaagugucaa

SEQ ID NO: 9528 - RNA, 38 nt, Artificial Sequence
  Description of Artificial Sequence:  Enzymatic Nucleic Acid
cagggauccugaugaggccguuaggccgaaaaguguca

SEQ ID NO: 9529 - RNA, 38 nt, Artificial Sequence
  Description of Artificial Sequence:  Enzymatic Nucleic Acid
ccaucaggcugaugaggccguuaggccgaaaucaaagu

SEQ ID NO: 9530 - RNA, 38 nt, Artificial Sequence
  Description of Artificial Sequence:  Enzymatic Nucleic Acid
ucccagaucugaugaggccguuaggccgaaaugcguuu

SEQ ID NO: 9531 - RNA, 38 nt, Artificial Sequence
  Description of Artificial Sequence:  Enzymatic Nucleic Acid
cugucccacugaugaggccguuaggccgaaauuaugcg

SEQ ID NO: 9532 - RNA, 38 nt, Artificial Sequence
  Description of Artificial Sequence:  Enzymatic Nucleic Acid
gcccuuuccugaugaggccguuaggccgaaacuguccc

SEQ ID NO: 9533 - RNA, 38 nt, Artificial Sequence
  Description of Artificial Sequence:  Enzymatic Nucleic Acid
auaugaugcugaugaggccguuaggccgaaagcccuuu

SEQ ID NO: 9534 - RNA, 38 nt, Artificial Sequence
  Description of Artificial Sequence:  Enzymatic Nucleic Acid
gauaugaucugaugaggccguuaggccgaaaagcccuu

SEQ ID NO: 9535 - RNA, 38 nt, Artificial Sequence
  Description of Artificial Sequence:  Enzymatic Nucleic Acid
uuugauaucugaugaggccguuaggccgaaaugaagcc

SEQ ID NO: 9536 - RNA, 38 nt, Artificial Sequence
  Description of Artificial Sequence:  Enzymatic Nucleic Acid
gcauuugacugaugaggccguuaggccgaaaugaugaa

SEQ ID NO: 9537 - RNA, 38 nt, Artificial Sequence
  Description of Artificial Sequence:  Enzymatic Nucleic Acid
uugcauuucugaugaggccguuaggccgaaauaugaug

SEQ ID NO: 9538 - RNA, 38 nt, Artificial Sequence
  Description of Artificial Sequence:  Enzymatic Nucleic Acid
uuucuuugcugaugaggccguuaggccgaaacguugca

SEQ ID NO: 9539 - RNA, 38 nt, Artificial Sequence
  Description of Artificial Sequence:  Enzymatic Nucleic Acid
agaagccccugaugaggccguuaggccgaaauuucuuu

SEQ ID NO: 9540 - RNA, 38 nt, Artificial Sequence
  Description of Artificial Sequence:  Enzymatic Nucleic Acid
caggucagcugaugaggccguuaggccgaaagcccuau

SEQ ID NO: 9541 - RNA, 38 nt, Artificial Sequence
  Description of Artificial Sequence:  Enzymatic Nucleic Acid
acaggucacugaugaggccguuaggccgaaaagcccua

SEQ ID NO: 9542 - RNA, 38 nt, Artificial Sequence
  Description of Artificial Sequence:  Enzymatic Nucleic Acid
ugcccauucugaugaggccguuaggccgaaacuguugc

SEQ ID NO: 9543 - RNA, 38 nt, Artificial Sequence
  Description of Artificial Sequence:  Enzymatic Nucleic Acid
cuuauacacugaugaggccguuaggccgaaaugcccau

SEQ ID NO: 9544 - RNA, 38 nt, Artificial Sequence
  Description of Artificial Sequence:  Enzymatic Nucleic Acid
ucuuauaccugaugaggccguuaggccgaaaaugccca

SEQ ID NO: 9545 - RNA, 38 nt, Artificial Sequence
  Description of Artificial Sequence:  Enzymatic Nucleic Acid
uugucuuacugaugaggccguuaggccgaaacaaaugc

SEQ ID NO: 9546 - RNA, 38 nt, Artificial Sequence
  Description of Artificial Sequence:  Enzymatic Nucleic Acid
guuugucucugaugaggccguuaggccgaaauacaaau

SEQ ID NO: 9547 - RNA, 38 nt, Artificial Sequence
  Description of Artificial Sequence:  Enzymatic Nucleic Acid
gugugagacugaugaggccguuaggccgaaaguuuguc

SEQ ID NO: 9548 - RNA, 38 nt, Artificial Sequence
  Description of Artificial Sequence:  Enzymatic Nucleic Acid
augugugacugaugaggccguuaggccgaaauaguuug

SEQ ID NO: 9549 - RNA, 38 nt, Artificial Sequence
  Description of Artificial Sequence:  Enzymatic Nucleic Acid
cgaugugucugaugaggccguuaggccgaaagauaguu

SEQ ID NO: 9550 - RNA, 38 nt, Artificial Sequence
  Description of Artificial Sequence:  Enzymatic Nucleic Acid
gguuuguccugaugaggccguuaggccgaaauguguga

SEQ ID NO: 9551 - RNA, 38 nt, Artificial Sequence
  Description of Artificial Sequence:  Enzymatic Nucleic Acid
uaugauugcugaugaggccguuaggccgaaauugguuu

SEQ ID NO: 9552 - RNA, 38 nt, Artificial Sequence
  Description of Artificial Sequence:  Enzymatic Nucleic Acid
acaucuaucugaugaggccguuaggccgaaauuguauu

SEQ ID NO: 9553 - RNA, 38 nt, Artificial Sequence
  Description of Artificial Sequence:  Enzymatic Nucleic Acid
uggacauccugaugaggccguuaggccgaaaugauugu

SEQ ID NO: 9554 - RNA, 38 nt, Artificial Sequence
  Description of Artificial Sequence:  Enzymatic Nucleic Acid
cuuauuugcugaugaggccguuaggccgaaacaucuau

SEQ ID NO: 9555 - RNA, 38 nt, Artificial Sequence
  Description of Artificial Sequence:  Enzymatic Nucleic Acid
ggugugcucugaugaggccguuaggccgaaauuuggac

SEQ ID NO: 9556 - RNA, 38 nt, Artificial Sequence
  Description of Artificial Sequence:  Enzymatic Nucleic Acid
aguaauuucugaugaggccguuaggccgaaacugggcg

SEQ ID NO: 9557 - RNA, 38 nt, Artificial Sequence
  Description of Artificial Sequence:  Enzymatic Nucleic Acid
cucuaagucugaugaggccguuaggccgaaauuugacu

SEQ ID NO: 9558 - RNA, 38 nt, Artificial Sequence
  Description of Artificial Sequence:  Enzymatic Nucleic Acid
ccucuaagcugaugaggccguuaggccgaaaauuugac

SEQ ID NO: 9559 - RNA, 38 nt, Artificial Sequence
  Description of Artificial Sequence:  Enzymatic Nucleic Acid
uggccucucugaugaggccguuaggccgaaaguaauuu

SEQ ID NO: 9560 - RNA, 38 nt, Artificial Sequence
  Description of Artificial Sequence:  Enzymatic Nucleic Acid
auggccuccugaugaggccguuaggccgaaaaguaauu

SEQ ID NO: 9561 - RNA, 38 nt, Artificial Sequence
  Description of Artificial Sequence:  Enzymatic Nucleic Acid
gacaagagcugaugaggccguuaggccgaaauggccuc

SEQ ID NO: 9562 - RNA, 38 nt, Artificial Sequence
  Description of Artificial Sequence:  Enzymatic Nucleic Acid
gaggacaacugaugaggccguuaggccgaaaguauggc

SEQ ID NO: 9563 - RNA, 38 nt, Artificial Sequence
  Description of Artificial Sequence:  Enzymatic Nucleic Acid
uugaggaccugaugaggccguuaggccgaaagaguaug

SEQ ID NO: 9564 - RNA, 38 nt, Artificial Sequence
  Description of Artificial Sequence:  Enzymatic Nucleic Acid
caauugagcugaugaggccguuaggccgaaacaagagu

SEQ ID NO: 9565 - RNA, 38 nt, Artificial Sequence
  Description of Artificial Sequence:  Enzymatic Nucleic Acid
guacaauucugaugaggccguuaggccgaaaggacaag

SEQ ID NO: 9566 - RNA, 38 nt, Artificial Sequence
  Description of Artificial Sequence:  Enzymatic Nucleic Acid
agcaguaccugaugaggccguuaggccgaaauugagga

SEQ ID NO: 9567 - RNA, 38 nt, Artificial Sequence
  Description of Artificial Sequence:  Enzymatic Nucleic Acid
gguagcagcugaugaggccguuaggccgaaacaauuga

SEQ ID NO: 9568 - RNA, 38 nt, Artificial Sequence
  Description of Artificial Sequence:  Enzymatic Nucleic Acid
gggaguggcugaugaggccguuaggccgaaagcaguac

SEQ ID NO: 9569 - RNA, 38 nt, Artificial Sequence
  Description of Artificial Sequence:  Enzymatic Nucleic Acid
guucaaggcugaugaggccguuaggccgaaagugguag

SEQ ID NO: 9570 - RNA, 38 nt, Artificial Sequence
  Description of Artificial Sequence:  Enzymatic Nucleic Acid
ucguguuccugaugaggccguuaggccgaaagggagug

SEQ ID NO: 9571 - RNA, 38 nt, Artificial Sequence
  Description of Artificial Sequence:  Enzymatic Nucleic Acid
gucauuugcugaugaggccguuaggccgaaacucucgu

SEQ ID NO: 9572 - RNA, 38 nt, Artificial Sequence
  Description of Artificial Sequence:  Enzymatic Nucleic Acid
ggucauuucugaugaggccguuaggccgaaaacucucg

SEQ ID NO: 9573 - RNA, 38 nt, Artificial Sequence
  Description of Artificial Sequence:  Enzymatic Nucleic Acid
aucagggucugaugaggccguuaggccgaaacuccagg

SEQ ID NO: 9574 - RNA, 38 nt, Artificial Sequence
  Description of Artificial Sequence:  Enzymatic Nucleic Acid
caucagggcugaugaggccguuaggccgaaaacuccag

SEQ ID NO: 9575 - RNA, 38 nt, Artificial Sequence
  Description of Artificial Sequence:  Enzymatic Nucleic Acid
agcucucucugaugaggccguuaggccgaaauuuuuuu

SEQ ID NO: 9576 - RNA, 38 nt, Artificial Sequence
  Description of Artificial Sequence:  Enzymatic Nucleic Acid
ccuuacggcugaugaggccguuaggccgaaagcucucu

SEQ ID NO: 9577 - RNA, 38 nt, Artificial Sequence
  Description of Artificial Sequence:  Enzymatic Nucleic Acid
gccuuacgcugaugaggccguuaggccgaaaagcucuc

SEQ ID NO: 9578 - RNA, 38 nt, Artificial Sequence
  Description of Artificial Sequence:  Enzymatic Nucleic Acid
cgucgccucugaugaggccguuaggccgaaacggaagc

SEQ ID NO: 9579 - RNA, 38 nt, Artificial Sequence
  Description of Artificial Sequence:  Enzymatic Nucleic Acid
cuuugguccugaugaggccguuaggccgaaauucgucg

SEQ ID NO: 9580 - RNA, 38 nt, Artificial Sequence
  Description of Artificial Sequence:  Enzymatic Nucleic Acid
ggcaugggcugaugaggccguuaggccgaaauugcuuu

SEQ ID NO: 9581 - RNA, 38 nt, Artificial Sequence
  Description of Artificial Sequence:  Enzymatic Nucleic Acid
uggcauggcugaugaggccguuaggccgaaaauugcuu

SEQ ID NO: 9582 - RNA, 38 nt, Artificial Sequence
  Description of Artificial Sequence:  Enzymatic Nucleic Acid
cuguagaacugaugaggccguuaggccgaaauguuggc

SEQ ID NO: 9583 - RNA, 38 nt, Artificial Sequence
  Description of Artificial Sequence:  Enzymatic Nucleic Acid
cacuguagcugaugaggccguuaggccgaaauauguug

SEQ ID NO: 9584 - RNA, 38 nt, Artificial Sequence
  Description of Artificial Sequence:  Enzymatic Nucleic Acid
acacuguacugaugaggccguuaggccgaaaauauguu

SEQ ID NO: 9585 - RNA, 38 nt, Artificial Sequence
  Description of Artificial Sequence:  Enzymatic Nucleic Acid
gaacacugcugaugaggccguuaggccgaaagaauaug

SEQ ID NO: 9586 - RNA, 38 nt, Artificial Sequence
  Description of Artificial Sequence:  Enzymatic Nucleic Acid
auaguaagcugaugaggccguuaggccgaaacacugua

SEQ ID NO: 9587 - RNA, 38 nt, Artificial Sequence
  Description of Artificial Sequence:  Enzymatic Nucleic Acid
aauaguaacugaugaggccguuaggccgaaaacacugu

SEQ ID NO: 9588 - RNA, 38 nt, Artificial Sequence
  Description of Artificial Sequence:  Enzymatic Nucleic Acid
ucaauagucugaugaggccguuaggccgaaagaacacu

SEQ ID NO: 9589 - RNA, 38 nt, Artificial Sequence
  Description of Artificial Sequence:  Enzymatic Nucleic Acid
gucaauagcugaugaggccguuaggccgaaaagaacac

SEQ ID NO: 9590 - RNA, 38 nt, Artificial Sequence
  Description of Artificial Sequence:  Enzymatic Nucleic Acid
uuugucaacugaugaggccguuaggccgaaaguaagaa

SEQ ID NO: 9591 - RNA, 38 nt, Artificial Sequence
  Description of Artificial Sequence:  Enzymatic Nucleic Acid
auuuuguccugaugaggccguuaggccgaaauaguaag

SEQ ID NO: 9592 - RNA, 38 nt, Artificial Sequence
  Description of Artificial Sequence:  Enzymatic Nucleic Acid
caaguauacugaugaggccguuaggccgaaaguccuuu

SEQ ID NO: 9593 - RNA, 38 nt, Artificial Sequence
  Description of Artificial Sequence:  Enzymatic Nucleic Acid
acaaguaucugaugaggccguuaggccgaaaaguccuu

SEQ ID NO: 9594 - RNA, 38 nt, Artificial Sequence
  Description of Artificial Sequence:  Enzymatic Nucleic Acid
gacaaguacugaugaggccguuaggccgaaaaaguccu

SEQ ID NO: 9595 - RNA, 38 nt, Artificial Sequence
  Description of Artificial Sequence:  Enzymatic Nucleic Acid
acgacaagcugaugaggccguuaggccgaaauaaaguc

SEQ ID NO: 9596 - RNA, 38 nt, Artificial Sequence
  Description of Artificial Sequence:  Enzymatic Nucleic Acid
uacacgaccugaugaggccguuaggccgaaaguauaaa

SEQ ID NO: 9597 - RNA, 38 nt, Artificial Sequence
  Description of Artificial Sequence:  Enzymatic Nucleic Acid
ccuuacaccugaugaggccguuaggccgaaacaaguau

SEQ ID NO: 9598 - RNA, 38 nt, Artificial Sequence
  Description of Artificial Sequence:  Enzymatic Nucleic Acid
ccacuccucugaugaggccguuaggccgaaacacgaca

SEQ ID NO: 9599 - RNA, 38 nt, Artificial Sequence
  Description of Artificial Sequence:  Enzymatic Nucleic Acid
auuugaaucugaugaggccguuaggccgaaauggucca

SEQ ID NO: 9600 - RNA, 38 nt, Artificial Sequence
  Description of Artificial Sequence:  Enzymatic Nucleic Acid
cagauuugcugaugaggccguuaggccgaaaugauggu

SEQ ID NO: 9601 - RNA, 38 nt, Artificial Sequence
  Description of Artificial Sequence:  Enzymatic Nucleic Acid
acagauuucugaugaggccguuaggccgaaaaugaugg

SEQ ID NO: 9602 - RNA, 38 nt, Artificial Sequence
  Description of Artificial Sequence:  Enzymatic Nucleic Acid
uguuaacacugaugaggccguuaggccgaaauuugaau

SEQ ID NO: 9603 - RNA, 38 nt, Artificial Sequence
  Description of Artificial Sequence:  Enzymatic Nucleic Acid
gagguguucugaugaggccguuaggccgaaacagauuu

SEQ ID NO: 9604 - RNA, 38 nt, Artificial Sequence
  Description of Artificial Sequence:  Enzymatic Nucleic Acid
ugaggugucugaugaggccguuaggccgaaaacagauu

SEQ ID NO: 9605 - RNA, 38 nt, Artificial Sequence
  Description of Artificial Sequence:  Enzymatic Nucleic Acid
uaugcacucugaugaggccguuaggccgaaagguguua

SEQ ID NO: 9606 - RNA, 38 nt, Artificial Sequence
  Description of Artificial Sequence:  Enzymatic Nucleic Acid
aucauauacugaugaggccguuaggccgaaaugcacug

SEQ ID NO: 9607 - RNA, 38 nt, Artificial Sequence
  Description of Artificial Sequence:  Enzymatic Nucleic Acid
uuaucauacugaugaggccguuaggccgaaauaugcac

SEQ ID NO: 9608 - RNA, 38 nt, Artificial Sequence
  Description of Artificial Sequence:  Enzymatic Nucleic Acid
cuuuaucacugaugaggccguuaggccgaaauauaugc

SEQ ID NO: 9609 - RNA, 38 nt, Artificial Sequence
  Description of Artificial Sequence:  Enzymatic Nucleic Acid
gaaugcuucugaugaggccguuaggccgaaaucauaua

SEQ ID NO: 9610 - RNA, 38 nt, Artificial Sequence
  Description of Artificial Sequence:  Enzymatic Nucleic Acid
cagugaugcugaugaggccguuaggccgaaaugcuuua

SEQ ID NO: 9611 - RNA, 38 nt, Artificial Sequence
  Description of Artificial Sequence:  Enzymatic Nucleic Acid
acagugaucugaugaggccguuaggccgaaaaugcuuu

SEQ ID NO: 9612 - RNA, 38 nt, Artificial Sequence
  Description of Artificial Sequence:  Enzymatic Nucleic Acid
uucacagucugaugaggccguuaggccgaaaugaaugc

SEQ ID NO: 9613 - RNA, 38 nt, Artificial Sequence
  Description of Artificial Sequence:  Enzymatic Nucleic Acid
cuguuuuccugaugaggccguuaggccgaaauguuuca

SEQ ID NO: 9614 - RNA, 38 nt, Artificial Sequence
  Description of Artificial Sequence:  Enzymatic Nucleic Acid
acgguuuccugaugaggccguuaggccgaaagcaccug

SEQ ID NO: 9615 - RNA, 38 nt, Artificial Sequence
  Description of Artificial Sequence:  Enzymatic Nucleic Acid
uugccagccugaugaggccguuaggccgaaacgguuuc

SEQ ID NO: 9616 - RNA, 38 nt, Artificial Sequence
  Description of Artificial Sequence:  Enzymatic Nucleic Acid
gccgguaacugaugaggccguuaggccgaaaccgcuug

SEQ ID NO: 9617 - RNA, 38 nt, Artificial Sequence
  Description of Artificial Sequence:  Enzymatic Nucleic Acid
gagccggucugaugaggccguuaggccgaaagaccgcu

SEQ ID NO: 9618 - RNA, 38 nt, Artificial Sequence
  Description of Artificial Sequence:  Enzymatic Nucleic Acid
agagccggcugaugaggccguuaggccgaaaagaccgc

SEQ ID NO: 9619 - RNA, 38 nt, Artificial Sequence
  Description of Artificial Sequence:  Enzymatic Nucleic Acid
uucauagacugaugaggccguuaggccgaaagccggua

SEQ ID NO: 9620 - RNA, 38 nt, Artificial Sequence
  Description of Artificial Sequence:  Enzymatic Nucleic Acid
cuuucauacugaugaggccguuaggccgaaagagccgg

SEQ ID NO: 9621 - RNA, 38 nt, Artificial Sequence
  Description of Artificial Sequence:  Enzymatic Nucleic Acid
cacuuucacugaugaggccguuaggccgaaagagagcc

SEQ ID NO: 9622 - RNA, 38 nt, Artificial Sequence
  Description of Artificial Sequence:  Enzymatic Nucleic Acid
gcgagggacugaugaggccguuaggccgaaaugccuuc

SEQ ID NO: 9623 - RNA, 38 nt, Artificial Sequence
  Description of Artificial Sequence:  Enzymatic Nucleic Acid
ggcgagggcugaugaggccguuaggccgaaaaugccuu

SEQ ID NO: 9624 - RNA, 38 nt, Artificial Sequence
  Description of Artificial Sequence:  Enzymatic Nucleic Acid
cggcgaggcugaugaggccguuaggccgaaaaaugccu

SEQ ID NO: 9625 - RNA, 38 nt, Artificial Sequence
  Description of Artificial Sequence:  Enzymatic Nucleic Acid
cuuccggccugaugaggccguuaggccgaaagggaaau

SEQ ID NO: 9626 - RNA, 38 nt, Artificial Sequence
  Description of Artificial Sequence:  Enzymatic Nucleic Acid
aaccauaccugaugaggccguuaggccgaaacuuccgg

SEQ ID NO: 9627 - RNA, 38 nt, Artificial Sequence
  Description of Artificial Sequence:  Enzymatic Nucleic Acid
uuuaaccacugaugaggccguuaggccgaaacaacuuc

SEQ ID NO: 9628 - RNA, 38 nt, Artificial Sequence
  Description of Artificial Sequence:  Enzymatic Nucleic Acid
caucuuuucugaugaggccguuaggccgaaaccauaca

SEQ ID NO: 9629 - RNA, 38 nt, Artificial Sequence
  Description of Artificial Sequence:  Enzymatic Nucleic Acid
ccaucuuucugaugaggccguuaggccgaaaaccauac

SEQ ID NO: 9630 - RNA, 38 nt, Artificial Sequence
  Description of Artificial Sequence:  Enzymatic Nucleic Acid
ucgcaggucugaugaggccguuaggccgaaacccaucu

SEQ ID NO: 9631 - RNA, 38 nt, Artificial Sequence
  Description of Artificial Sequence:  Enzymatic Nucleic Acid
gucgcaggcugaugaggccguuaggccgaaaacccauc

SEQ ID NO: 9632 - RNA, 38 nt, Artificial Sequence
  Description of Artificial Sequence:  Enzymatic Nucleic Acid
agcgagcacugaugaggccguuaggccgaaauuucuca

SEQ ID NO: 9633 - RNA, 38 nt, Artificial Sequence
  Description of Artificial Sequence:  Enzymatic Nucleic Acid
caaauagccugaugaggccguuaggccgaaagcagauu

SEQ ID NO: 9634 - RNA, 38 nt, Artificial Sequence
  Description of Artificial Sequence:  Enzymatic Nucleic Acid
gagucaaacugaugaggccguuaggccgaaagcgagca

SEQ ID NO: 9635 - RNA, 38 nt, Artificial Sequence
  Description of Artificial Sequence:  Enzymatic Nucleic Acid
acgagucacugaugaggccguuaggccgaaauagcgag

SEQ ID NO: 9636 - RNA, 38 nt, Artificial Sequence
  Description of Artificial Sequence:  Enzymatic Nucleic Acid
cacgaguccugaugaggccguuaggccgaaaauagcga

SEQ ID NO: 9637 - RNA, 38 nt, Artificial Sequence
  Description of Artificial Sequence:  Enzymatic Nucleic Acid
guagccaccugaugaggccguuaggccgaaagucaaau

SEQ ID NO: 9638 - RNA, 38 nt, Artificial Sequence
  Description of Artificial Sequence:  Enzymatic Nucleic Acid
uuaacgagcugaugaggccguuaggccgaaagccacga

SEQ ID NO: 9639 - RNA, 38 nt, Artificial Sequence
  Description of Artificial Sequence:  Enzymatic Nucleic Acid
uaauuaaccugaugaggccguuaggccgaaaguagcca

SEQ ID NO: 9640 - RNA, 38 nt, Artificial Sequence
  Description of Artificial Sequence:  Enzymatic Nucleic Acid
ugauaauucugaugaggccguuaggccgaaacgaguag

SEQ ID NO: 9641 - RNA, 38 nt, Artificial Sequence
  Description of Artificial Sequence:  Enzymatic Nucleic Acid
uugauaaucugaugaggccguuaggccgaaaacgagua

SEQ ID NO: 9642 - RNA, 38 nt, Artificial Sequence
  Description of Artificial Sequence:  Enzymatic Nucleic Acid
uccuugaucugaugaggccguuaggccgaaauuaacga

SEQ ID NO: 9643 - RNA, 38 nt, Artificial Sequence
  Description of Artificial Sequence:  Enzymatic Nucleic Acid
guccuugacugaugaggccguuaggccgaaaauuaacg

SEQ ID NO: 9644 - RNA, 38 nt, Artificial Sequence
  Description of Artificial Sequence:  Enzymatic Nucleic Acid
acguccuucugaugaggccguuaggccgaaauaauuaa

SEQ ID NO: 9645 - RNA, 38 nt, Artificial Sequence
  Description of Artificial Sequence:  Enzymatic Nucleic Acid
ucuucagucugaugaggccguuaggccgaaacguccuu

SEQ ID NO: 9646 - RNA, 38 nt, Artificial Sequence
  Description of Artificial Sequence:  Enzymatic Nucleic Acid
gauuguaucugaugaggccguuaggccgaaauucccug

SEQ ID NO: 9647 - RNA, 38 nt, Artificial Sequence
  Description of Artificial Sequence:  Enzymatic Nucleic Acid
agauuguacugaugaggccguuaggccgaaaauucccu

SEQ ID NO: 9648 - RNA, 38 nt, Artificial Sequence
  Description of Artificial Sequence:  Enzymatic Nucleic Acid
caagauugcugaugaggccguuaggccgaaauaauucc

SEQ ID NO: 9649 - RNA, 38 nt, Artificial Sequence
  Description of Artificial Sequence:  Enzymatic Nucleic Acid
cucagcaacugaugaggccguuaggccgaaauuguaua

SEQ ID NO: 9650 - RNA, 38 nt, Artificial Sequence
  Description of Artificial Sequence:  Enzymatic Nucleic Acid
ugcucagccugaugaggccguuaggccgaaagauugua

SEQ ID NO: 9651 - RNA, 38 nt, Artificial Sequence
  Description of Artificial Sequence:  Enzymatic Nucleic Acid
gacuguuucugaugaggccguuaggccgaaaugcucag

SEQ ID NO: 9652 - RNA, 38 nt, Artificial Sequence
  Description of Artificial Sequence:  Enzymatic Nucleic Acid
acacauuucugaugaggccguuaggccgaaacuguuuu

SEQ ID NO: 9653 - RNA, 38 nt, Artificial Sequence
  Description of Artificial Sequence:  Enzymatic Nucleic Acid
gguuuuuacugaugaggccguuaggccgaaacacauuu

SEQ ID NO: 9654 - RNA, 38 nt, Artificial Sequence
  Description of Artificial Sequence:  Enzymatic Nucleic Acid
agguuuuucugaugaggccguuaggccgaaaacacauu

SEQ ID NO: 9655 - RNA, 38 nt, Artificial Sequence
  Description of Artificial Sequence:  Enzymatic Nucleic Acid
gagguuuucugaugaggccguuaggccgaaaaacacau

SEQ ID NO: 9656 - RNA, 38 nt, Artificial Sequence
  Description of Artificial Sequence:  Enzymatic Nucleic Acid
guggcagucugaugaggccguuaggccgaaagguuuuu

SEQ ID NO: 9657 - RNA, 38 nt, Artificial Sequence
  Description of Artificial Sequence:  Enzymatic Nucleic Acid
gacaauuacugaugaggccguuaggccgaaaguggcag

SEQ ID NO: 9658 - RNA, 38 nt, Artificial Sequence
  Description of Artificial Sequence:  Enzymatic Nucleic Acid
uugacaaucugaugaggccguuaggccgaaagaguggc

SEQ ID NO: 9659 - RNA, 38 nt, Artificial Sequence
  Description of Artificial Sequence:  Enzymatic Nucleic Acid
acauugaccugaugaggccguuaggccgaaauuagagu

SEQ ID NO: 9660 - RNA, 38 nt, Artificial Sequence
  Description of Artificial Sequence:  Enzymatic Nucleic Acid
uucacauucugaugaggccguuaggccgaaacaauuag

SEQ ID NO: 9661 - RNA, 38 nt, Artificial Sequence
  Description of Artificial Sequence:  Enzymatic Nucleic Acid
uuuucguacugaugaggccguuaggccgaaaucugggg

SEQ ID NO: 9662 - RNA, 38 nt, Artificial Sequence
  Description of Artificial Sequence:  Enzymatic Nucleic Acid
cuuuucgucugaugaggccguuaggccgaaaaucuggg

SEQ ID NO: 9663 - RNA, 38 nt, Artificial Sequence
  Description of Artificial Sequence:  Enzymatic Nucleic Acid
ccuuuucgcugaugaggccguuaggccgaaaaaucugg

SEQ ID NO: 9664 - RNA, 38 nt, Artificial Sequence
  Description of Artificial Sequence:  Enzymatic Nucleic Acid
gaaacgaucugaugaggccguuaggccgaaacacggcc

SEQ ID NO: 9665 - RNA, 38 nt, Artificial Sequence
  Description of Artificial Sequence:  Enzymatic Nucleic Acid
cuggaaaccugaugaggccguuaggccgaaaugacacg

SEQ ID NO: 9666 - RNA, 38 nt, Artificial Sequence
  Description of Artificial Sequence:  Enzymatic Nucleic Acid
ggucuggacugaugaggccguuaggccgaaacgaugac

SEQ ID NO: 9667 - RNA, 38 nt, Artificial Sequence
  Description of Artificial Sequence:  Enzymatic Nucleic Acid
gggucuggcugaugaggccguuaggccgaaaacgauga

SEQ ID NO: 9668 - RNA, 38 nt, Artificial Sequence
  Description of Artificial Sequence:  Enzymatic Nucleic Acid
cgggucugcugaugaggccguuaggccgaaaaacgaug

SEQ ID NO: 9669 - RNA, 38 nt, Artificial Sequence
  Description of Artificial Sequence:  Enzymatic Nucleic Acid
uggguagacugaugaggccguuaggccgaaagccgggu

SEQ ID NO: 9670 - RNA, 38 nt, Artificial Sequence
  Description of Artificial Sequence:  Enzymatic Nucleic Acid
aguggguacugaugaggccguuaggccgaaagagccgg

SEQ ID NO: 9671 - RNA, 38 nt, Artificial Sequence
  Description of Artificial Sequence:  Enzymatic Nucleic Acid
ccagugggcugaugaggccguuaggccgaaagagagcc

SEQ ID NO: 9672 - RNA, 38 nt, Artificial Sequence
  Description of Artificial Sequence:  Enzymatic Nucleic Acid
caagucagcugaugaggccguuaggccgaaauuugucu

SEQ ID NO: 9673 - RNA, 38 nt, Artificial Sequence
  Description of Artificial Sequence:  Enzymatic Nucleic Acid
ugcgguaccugaugaggccguuaggccgaaagucagga

SEQ ID NO: 9674 - RNA, 38 nt, Artificial Sequence
  Description of Artificial Sequence:  Enzymatic Nucleic Acid
auaugcggcugaugaggccguuaggccgaaacaaguca

SEQ ID NO: 9675 - RNA, 38 nt, Artificial Sequence
  Description of Artificial Sequence:  Enzymatic Nucleic Acid
ggauaccacugaugaggccguuaggccgaaaugcggua

SEQ ID NO: 9676 - RNA, 38 nt, Artificial Sequence
  Description of Artificial Sequence:  Enzymatic Nucleic Acid
uugagggacugaugaggccguuaggccgaaaccauaug

SEQ ID NO: 9677 - RNA, 38 nt, Artificial Sequence
  Description of Artificial Sequence:  Enzymatic Nucleic Acid
gguugaggcugaugaggccguuaggccgaaauaccaua

SEQ ID NO: 9678 - RNA, 38 nt, Artificial Sequence
  Description of Artificial Sequence:  Enzymatic Nucleic Acid
uguagguucugaugaggccguuaggccgaaagggauac

SEQ ID NO: 9679 - RNA, 38 nt, Artificial Sequence
  Description of Artificial Sequence:  Enzymatic Nucleic Acid
cuugauugcugaugaggccguuaggccgaaagguugag

SEQ ID NO: 9680 - RNA, 38 nt, Artificial Sequence
  Description of Artificial Sequence:  Enzymatic Nucleic Acid
aaccacuucugaugaggccguuaggccgaaauuguagg

SEQ ID NO: 9681 - RNA, 38 nt, Artificial Sequence
  Description of Artificial Sequence:  Enzymatic Nucleic Acid
ggugccagcugaugaggccguuaggccgaaaccacuug

SEQ ID NO: 9682 - RNA, 38 nt, Artificial Sequence
  Description of Artificial Sequence:  Enzymatic Nucleic Acid
gggugccacugaugaggccguuaggccgaaaaccacuu

SEQ ID NO: 9683 - RNA, 38 nt, Artificial Sequence
  Description of Artificial Sequence:  Enzymatic Nucleic Acid
auuauggucugaugaggccguuaggccgaaacaggggu

SEQ ID NO: 9684 - RNA, 38 nt, Artificial Sequence
  Description of Artificial Sequence:  Enzymatic Nucleic Acid
ggaaugaucugaugaggccguuaggccgaaaugguuac

SEQ ID NO: 9685 - RNA, 38 nt, Artificial Sequence
  Description of Artificial Sequence:  Enzymatic Nucleic Acid
uucggaaucugaugaggccguuaggccgaaauuauggu

SEQ ID NO: 9686 - RNA, 38 nt, Artificial Sequence
  Description of Artificial Sequence:  Enzymatic Nucleic Acid
ugcuucggcugaugaggccguuaggccgaaaugauuau

SEQ ID NO: 9687 - RNA, 38 nt, Artificial Sequence
  Description of Artificial Sequence:  Enzymatic Nucleic Acid
uugcuucgcugaugaggccguuaggccgaaaaugauua

SEQ ID NO: 9688 - RNA, 38 nt, Artificial Sequence
  Description of Artificial Sequence:  Enzymatic Nucleic Acid
uggaacaacugaugaggccguuaggccgaaagucacac

SEQ ID NO: 9689 - RNA, 38 nt, Artificial Sequence
  Description of Artificial Sequence:  Enzymatic Nucleic Acid
uuggaacacugaugaggccguuaggccgaaaagucaca

SEQ ID NO: 9690 - RNA, 38 nt, Artificial Sequence
  Description of Artificial Sequence:  Enzymatic Nucleic Acid
auuggaaccugaugaggccguuaggccgaaaaagucac

SEQ ID NO: 9691 - RNA, 38 nt, Artificial Sequence
  Description of Artificial Sequence:  Enzymatic Nucleic Acid
auuauuggcugaugaggccguuaggccgaaacaaaagu

SEQ ID NO: 9692 - RNA, 38 nt, Artificial Sequence
  Description of Artificial Sequence:  Enzymatic Nucleic Acid
cauuauugcugaugaggccguuaggccgaaaacaaaag

SEQ ID NO: 9693 - RNA, 38 nt, Artificial Sequence
  Description of Artificial Sequence:  Enzymatic Nucleic Acid
cucuucaucugaugaggccguuaggccgaaauuggaac

SEQ ID NO: 9694 - RNA, 38 nt, Artificial Sequence
  Description of Artificial Sequence:  Enzymatic Nucleic Acid
ggauaaagcugaugaggccguuaggccgaaacucuuca

SEQ ID NO: 9695 - RNA, 38 nt, Artificial Sequence
  Description of Artificial Sequence:  Enzymatic Nucleic Acid
ccaggauacugaugaggccguuaggccgaaaggacucu

SEQ ID NO: 9696 - RNA, 38 nt, Artificial Sequence
  Description of Artificial Sequence:  Enzymatic Nucleic Acid
uccaggaucugaugaggccguuaggccgaaaaggacuc

SEQ ID NO: 9697 - RNA, 38 nt, Artificial Sequence
  Description of Artificial Sequence:  Enzymatic Nucleic Acid
auccaggacugaugaggccguuaggccgaaaaaggacu

SEQ ID NO: 9698 - RNA, 38 nt, Artificial Sequence
  Description of Artificial Sequence:  Enzymatic Nucleic Acid
gcauccagcugaugaggccguuaggccgaaauaaagga

SEQ ID NO: 9699 - RNA, 38 nt, Artificial Sequence
  Description of Artificial Sequence:  Enzymatic Nucleic Acid
augcucuccugaugaggccguuaggccgaaauucuguu

SEQ ID NO: 9700 - RNA, 38 nt, Artificial Sequence
  Description of Artificial Sequence:  Enzymatic Nucleic Acid
cgcugagucugaugaggccguuaggccgaaaugcucuc

SEQ ID NO: 9701 - RNA, 38 nt, Artificial Sequence
  Description of Artificial Sequence:  Enzymatic Nucleic Acid
caugcgcucugaugaggccguuaggccgaaagugaugc

SEQ ID NO: 9702 - RNA, 38 nt, Artificial Sequence
  Description of Artificial Sequence:  Enzymatic Nucleic Acid
ccuucuaucugaugaggccguuaggccgaaauugccau

SEQ ID NO: 9703 - RNA, 38 nt, Artificial Sequence
  Description of Artificial Sequence:  Enzymatic Nucleic Acid
uuuccuuccugaugaggccguuaggccgaaauuauugc

SEQ ID NO: 9704 - RNA, 38 nt, Artificial Sequence
  Description of Artificial Sequence:  Enzymatic Nucleic Acid
agccaucucugaugaggccguuaggccgaaauucuuuc

SEQ ID NO: 9705 - RNA, 38 nt, Artificial Sequence
  Description of Artificial Sequence:  Enzymatic Nucleic Acid
caaggugccugaugaggccguuaggccgaaagccaucu

SEQ ID NO: 9706 - RNA, 38 nt, Artificial Sequence
  Description of Artificial Sequence:  Enzymatic Nucleic Acid
ccacaacccugaugaggccguuaggccgaaaggugcua

SEQ ID NO: 9707 - RNA, 38 nt, Artificial Sequence
  Description of Artificial Sequence:  Enzymatic Nucleic Acid
ucagccaccugaugaggccguuaggccgaaaccaaggu

SEQ ID NO: 9708 - RNA, 38 nt, Artificial Sequence
  Description of Artificial Sequence:  Enzymatic Nucleic Acid
aaauucuacugaugaggccguuaggccgaaagucagcc

SEQ ID NO: 9709 - RNA, 38 nt, Artificial Sequence
  Description of Artificial Sequence:  Enzymatic Nucleic Acid
agaaauuccugaugaggccguuaggccgaaagagucag

SEQ ID NO: 9710 - RNA, 38 nt, Artificial Sequence
  Description of Artificial Sequence:  Enzymatic Nucleic Acid
auuccagacugaugaggccguuaggccgaaauucuaga

SEQ ID NO: 9711 - RNA, 38 nt, Artificial Sequence
  Description of Artificial Sequence:  Enzymatic Nucleic Acid
gauuccagcugaugaggccguuaggccgaaaauucuag

SEQ ID NO: 9712 - RNA, 38 nt, Artificial Sequence
  Description of Artificial Sequence:  Enzymatic Nucleic Acid
agauuccacugaugaggccguuaggccgaaaaauucua

SEQ ID NO: 9713 - RNA, 38 nt, Artificial Sequence
  Description of Artificial Sequence:  Enzymatic Nucleic Acid
caaauguacugaugaggccguuaggccgaaauuccaga

SEQ ID NO: 9714 - RNA, 38 nt, Artificial Sequence
  Description of Artificial Sequence:  Enzymatic Nucleic Acid
ugcaaaugcugaugaggccguuaggccgaaagauucca

SEQ ID NO: 9715 - RNA, 38 nt, Artificial Sequence
  Description of Artificial Sequence:  Enzymatic Nucleic Acid
gcuaugcacugaugaggccguuaggccgaaauguagau

SEQ ID NO: 9716 - RNA, 38 nt, Artificial Sequence
  Description of Artificial Sequence:  Enzymatic Nucleic Acid
agcuaugccugaugaggccguuaggccgaaaauguaga

SEQ ID NO: 9717 - RNA, 38 nt, Artificial Sequence
  Description of Artificial Sequence:  Enzymatic Nucleic Acid
uuggaagccugaugaggccguuaggccgaaaugcaaau

SEQ ID NO: 9718 - RNA, 38 nt, Artificial Sequence
  Description of Artificial Sequence:  Enzymatic Nucleic Acid
uuuauuggcugaugaggccguuaggccgaaagcuaugc

SEQ ID NO: 9719 - RNA, 38 nt, Artificial Sequence
  Description of Artificial Sequence:  Enzymatic Nucleic Acid
cuuuauugcugaugaggccguuaggccgaaaagcuaug

SEQ ID NO: 9720 - RNA, 38 nt, Artificial Sequence
  Description of Artificial Sequence:  Enzymatic Nucleic Acid
cccaacuucugaugaggccguuaggccgaaauuggaag

SEQ ID NO: 9721 - RNA, 38 nt, Artificial Sequence
  Description of Artificial Sequence:  Enzymatic Nucleic Acid
acaguccccugaugaggccguuaggccgaaacuuuauu

SEQ ID NO: 9722 - RNA, 38 nt, Artificial Sequence
  Description of Artificial Sequence:  Enzymatic Nucleic Acid
uaaaagcucugaugaggccguuaggccgaaauguuucu

SEQ ID NO: 9723 - RNA, 38 nt, Artificial Sequence
  Description of Artificial Sequence:  Enzymatic Nucleic Acid
ugauauaacugaugaggccguuaggccgaaagcuuaug

SEQ ID NO: 9724 - RNA, 38 nt, Artificial Sequence
  Description of Artificial Sequence:  Enzymatic Nucleic Acid
gugauauacugaugaggccguuaggccgaaaagcuuau

SEQ ID NO: 9725 - RNA, 38 nt, Artificial Sequence
  Description of Artificial Sequence:  Enzymatic Nucleic Acid
ugugauaucugaugaggccguuaggccgaaaaagcuua

SEQ ID NO: 9726 - RNA, 38 nt, Artificial Sequence
  Description of Artificial Sequence:  Enzymatic Nucleic Acid
cugugauacugaugaggccguuaggccgaaaaaagcuu

SEQ ID NO: 9727 - RNA, 38 nt, Artificial Sequence
  Description of Artificial Sequence:  Enzymatic Nucleic Acid
aucugugacugaugaggccguuaggccgaaauaaaagc

SEQ ID NO: 9728 - RNA, 38 nt, Artificial Sequence
  Description of Artificial Sequence:  Enzymatic Nucleic Acid
acaucugucugaugaggccguuaggccgaaauauaaaa

SEQ ID NO: 9729 - RNA, 38 nt, Artificial Sequence
  Description of Artificial Sequence:  Enzymatic Nucleic Acid
uaacaugacugaugaggccguuaggccgaaacccauuu

SEQ ID NO: 9730 - RNA, 38 nt, Artificial Sequence
  Description of Artificial Sequence:  Enzymatic Nucleic Acid
uuaacaugcugaugaggccguuaggccgaaaacccauu

SEQ ID NO: 9731 - RNA, 38 nt, Artificial Sequence
  Description of Artificial Sequence:  Enzymatic Nucleic Acid
guuaacaucugaugaggccguuaggccgaaaaacccau

SEQ ID NO: 9732 - RNA, 38 nt, Artificial Sequence
  Description of Artificial Sequence:  Enzymatic Nucleic Acid
uccaaguucugaugaggccguuaggccgaaacaugaaa

SEQ ID NO: 9733 - RNA, 38 nt, Artificial Sequence
  Description of Artificial Sequence:  Enzymatic Nucleic Acid
uuccaagucugaugaggccguuaggccgaaaacaugaa

SEQ ID NO: 9734 - RNA, 38 nt, Artificial Sequence
  Description of Artificial Sequence:  Enzymatic Nucleic Acid
uuuuuucccugaugaggccguuaggccgaaaguuaaca

SEQ ID NO: 9735 - RNA, 38 nt, Artificial Sequence
  Description of Artificial Sequence:  Enzymatic Nucleic Acid
cugugcaacugaugaggccguuaggccgaaacaguuuc

SEQ ID NO: 9736 - RNA, 38 nt, Artificial Sequence
  Description of Artificial Sequence:  Enzymatic Nucleic Acid
aacugugccugaugaggccguuaggccgaaagacaguu

SEQ ID NO: 9737 - RNA, 38 nt, Artificial Sequence
  Description of Artificial Sequence:  Enzymatic Nucleic Acid
aacuuguucugaugaggccguuaggccgaaacugugca

SEQ ID NO: 9738 - RNA, 38 nt, Artificial Sequence
  Description of Artificial Sequence:  Enzymatic Nucleic Acid
gaacuugucugaugaggccguuaggccgaaaacugugc

SEQ ID NO: 9739 - RNA, 38 nt, Artificial Sequence
  Description of Artificial Sequence:  Enzymatic Nucleic Acid
uguauaagcugaugaggccguuaggccgaaacuuguua

SEQ ID NO: 9740 - RNA, 38 nt, Artificial Sequence
  Description of Artificial Sequence:  Enzymatic Nucleic Acid
cuguauaacugaugaggccguuaggccgaaaacuuguu

SEQ ID NO: 9741 - RNA, 38 nt, Artificial Sequence
  Description of Artificial Sequence:  Enzymatic Nucleic Acid
cucuguaucugaugaggccguuaggccgaaagaacuug

SEQ ID NO: 9742 - RNA, 38 nt, Artificial Sequence
  Description of Artificial Sequence:  Enzymatic Nucleic Acid
ucucuguacugaugaggccguuaggccgaaaagaacuu

SEQ ID NO: 9743 - RNA, 38 nt, Artificial Sequence
  Description of Artificial Sequence:  Enzymatic Nucleic Acid
cgucucugcugaugaggccguuaggccgaaauaagaac

SEQ ID NO: 9744 - RNA, 38 nt, Artificial Sequence
  Description of Artificial Sequence:  Enzymatic Nucleic Acid
auccaagucugaugaggccguuaggccgaaacgucucu

SEQ ID NO: 9745 - RNA, 38 nt, Artificial Sequence
  Description of Artificial Sequence:  Enzymatic Nucleic Acid
aauccaagcugaugaggccguuaggccgaaaacgucuc

SEQ ID NO: 9746 - RNA, 38 nt, Artificial Sequence
  Description of Artificial Sequence:  Enzymatic Nucleic Acid
uaaaaucccugaugaggccguuaggccgaaaguaacgu

SEQ ID NO: 9747 - RNA, 38 nt, Artificial Sequence
  Description of Artificial Sequence:  Enzymatic Nucleic Acid
cgcaguaacugaugaggccguuaggccgaaauccaagu

SEQ ID NO: 9748 - RNA, 38 nt, Artificial Sequence
  Description of Artificial Sequence:  Enzymatic Nucleic Acid
ccgcaguacugaugaggccguuaggccgaaaauccaag

SEQ ID NO: 9749 - RNA, 38 nt, Artificial Sequence
  Description of Artificial Sequence:  Enzymatic Nucleic Acid
uccgcagucugaugaggccguuaggccgaaaaauccaa

SEQ ID NO: 9750 - RNA, 38 nt, Artificial Sequence
  Description of Artificial Sequence:  Enzymatic Nucleic Acid
guccgcagcugaugaggccguuaggccgaaaaaaucca

SEQ ID NO: 9751 - RNA, 38 nt, Artificial Sequence
  Description of Artificial Sequence:  Enzymatic Nucleic Acid
cuguuauucugaugaggccguuaggccgaaacuguccg

SEQ ID NO: 9752 - RNA, 38 nt, Artificial Sequence
  Description of Artificial Sequence:  Enzymatic Nucleic Acid
ucuguuaucugaugaggccguuaggccgaaaacugucc

SEQ ID NO: 9753 - RNA, 38 nt, Artificial Sequence
  Description of Artificial Sequence:  Enzymatic Nucleic Acid
uguucugucugaugaggccguuaggccgaaauuaacug

SEQ ID NO: 9754 - RNA, 38 nt, Artificial Sequence
  Description of Artificial Sequence:  Enzymatic Nucleic Acid
uaauacugcugaugaggccguuaggccgaaagugcauu

SEQ ID NO: 9755 - RNA, 38 nt, Artificial Sequence
  Description of Artificial Sequence:  Enzymatic Nucleic Acid
cuugcuaacugaugaggccguuaggccgaaacuguagu

SEQ ID NO: 9756 - RNA, 38 nt, Artificial Sequence
  Description of Artificial Sequence:  Enzymatic Nucleic Acid
ugcuugcucugaugaggccguuaggccgaaauacugua

SEQ ID NO: 9757 - RNA, 38 nt, Artificial Sequence
  Description of Artificial Sequence:  Enzymatic Nucleic Acid
uugcuugccugaugaggccguuaggccgaaaauacugu

SEQ ID NO: 9758 - RNA, 38 nt, Artificial Sequence
  Description of Artificial Sequence:  Enzymatic Nucleic Acid
uccuuagucugaugaggccguuaggccgaaauggccau

SEQ ID NO: 9759 - RNA, 38 nt, Artificial Sequence
  Description of Artificial Sequence:  Enzymatic Nucleic Acid
gugcuccucugaugaggccguuaggccgaaagugaugg

SEQ ID NO: 9760 - RNA, 38 nt, Artificial Sequence
  Description of Artificial Sequence:  Enzymatic Nucleic Acid
gagugaugcugaugaggccguuaggccgaaagugcucc

SEQ ID NO: 9761 - RNA, 38 nt, Artificial Sequence
  Description of Artificial Sequence:  Enzymatic Nucleic Acid
uuaagagucugaugaggccguuaggccgaaauggagug

SEQ ID NO: 9762 - RNA, 38 nt, Artificial Sequence
  Description of Artificial Sequence:  Enzymatic Nucleic Acid
aagauuaacugaugaggccguuaggccgaaagugaugg

SEQ ID NO: 9763 - RNA, 38 nt, Artificial Sequence
  Description of Artificial Sequence:  Enzymatic Nucleic Acid
guaagauucugaugaggccguuaggccgaaagagugau

SEQ ID NO: 9764 - RNA, 38 nt, Artificial Sequence
  Description of Artificial Sequence:  Enzymatic Nucleic Acid
gguaagaucugaugaggccguuaggccgaaaagaguga

SEQ ID NO: 9765 - RNA, 38 nt, Artificial Sequence
  Description of Artificial Sequence:  Enzymatic Nucleic Acid
gaugguaacugaugaggccguuaggccgaaauuaagag

SEQ ID NO: 9766 - RNA, 38 nt, Artificial Sequence
  Description of Artificial Sequence:  Enzymatic Nucleic Acid
augauggucugaugaggccguuaggccgaaagauuaag

SEQ ID NO: 9767 - RNA, 38 nt, Artificial Sequence
  Description of Artificial Sequence:  Enzymatic Nucleic Acid
caugauggcugaugaggccguuaggccgaaaagauuaa

SEQ ID NO: 9768 - RNA, 38 nt, Artificial Sequence
  Description of Artificial Sequence:  Enzymatic Nucleic Acid
acauucaucugaugaggccguuaggccgaaaugguaag

SEQ ID NO: 9769 - RNA, 38 nt, Artificial Sequence
  Description of Artificial Sequence:  Enzymatic Nucleic Acid
ugcagggacugaugaggccguuaggccgaaacauucau

SEQ ID NO: 9770 - RNA, 38 nt, Artificial Sequence
  Description of Artificial Sequence:  Enzymatic Nucleic Acid
uugcagggcugaugaggccguuaggccgaaaacauuca

SEQ ID NO: 9771 - RNA, 38 nt, Artificial Sequence
  Description of Artificial Sequence:  Enzymatic Nucleic Acid
cuugcaggcugaugaggccguuaggccgaaaaacauuc

SEQ ID NO: 9772 - RNA, 38 nt, Artificial Sequence
  Description of Artificial Sequence:  Enzymatic Nucleic Acid
ggugccugcugaugaggccguuaggccgaaaucuugca

SEQ ID NO: 9773 - RNA, 38 nt, Artificial Sequence
  Description of Artificial Sequence:  Enzymatic Nucleic Acid
aggugccucugaugaggccguuaggccgaaaaucuugc

SEQ ID NO: 9774 - RNA, 38 nt, Artificial Sequence
  Description of Artificial Sequence:  Enzymatic Nucleic Acid
ugcaggcacugaugaggccguuaggccgaaaggugccu

SEQ ID NO: 9775 - RNA, 38 nt, Artificial Sequence
  Description of Artificial Sequence:  Enzymatic Nucleic Acid
ccuguguacugaugaggccguuaggccgaaacauuccu

SEQ ID NO: 9776 - RNA, 38 nt, Artificial Sequence
  Description of Artificial Sequence:  Enzymatic Nucleic Acid
ccccugugcugaugaggccguuaggccgaaauacauuc

SEQ ID NO: 9777 - RNA, 38 nt, Artificial Sequence
  Description of Artificial Sequence:  Enzymatic Nucleic Acid
uucuggagcugaugaggccguuaggccgaaauuucuuc

SEQ ID NO: 9778 - RNA, 38 nt, Artificial Sequence
  Description of Artificial Sequence:  Enzymatic Nucleic Acid
uucuucugcugaugaggccguuaggccgaaaggauuuc

SEQ ID NO: 9779 - RNA, 38 nt, Artificial Sequence
  Description of Artificial Sequence:  Enzymatic Nucleic Acid
cugauugucugaugaggccguuaggccgaaauuucuuu

SEQ ID NO: 9780 - RNA, 38 nt, Artificial Sequence
  Description of Artificial Sequence:  Enzymatic Nucleic Acid
ucugauugcugaugaggccguuaggccgaaaauuucuu

SEQ ID NO: 9781 - RNA, 38 nt, Artificial Sequence
  Description of Artificial Sequence:  Enzymatic Nucleic Acid
ugaucucucugaugaggccguuaggccgaaauuguaau

SEQ ID NO: 9782 - RNA, 38 nt, Artificial Sequence
  Description of Artificial Sequence:  Enzymatic Nucleic Acid
ugcuuccucugaugaggccguuaggccgaaaucucuga

SEQ ID NO: 9783 - RNA, 38 nt, Artificial Sequence
  Description of Artificial Sequence:  Enzymatic Nucleic Acid
gcaggaggcugaugaggccguuaggccgaaauggugcu

SEQ ID NO: 9784 - RNA, 38 nt, Artificial Sequence
  Description of Artificial Sequence:  Enzymatic Nucleic Acid
uuucgcagcugaugaggccguuaggccgaaagguaugg

SEQ ID NO: 9785 - RNA, 38 nt, Artificial Sequence
  Description of Artificial Sequence:  Enzymatic Nucleic Acid
ugaucacucugaugaggccguuaggccgaaagguuucg

SEQ ID NO: 9786 - RNA, 38 nt, Artificial Sequence
  Description of Artificial Sequence:  Enzymatic Nucleic Acid
cacugugucugaugaggccguuaggccgaaaucacuga

SEQ ID NO: 9787 - RNA, 38 nt, Artificial Sequence
  Description of Artificial Sequence:  Enzymatic Nucleic Acid
gaacugcucugaugaggccguuaggccgaaauggccac

SEQ ID NO: 9788 - RNA, 38 nt, Artificial Sequence
  Description of Artificial Sequence:  Enzymatic Nucleic Acid
agugguggcugaugaggccguuaggccgaaacugcuga

SEQ ID NO: 9789 - RNA, 38 nt, Artificial Sequence
  Description of Artificial Sequence:  Enzymatic Nucleic Acid
aaguggugcugaugaggccguuaggccgaaaacugcug

SEQ ID NO: 9790 - RNA, 38 nt, Artificial Sequence
  Description of Artificial Sequence:  Enzymatic Nucleic Acid
acagucuacugaugaggccguuaggccgaaaguggugg

SEQ ID NO: 9791 - RNA, 38 nt, Artificial Sequence
  Description of Artificial Sequence:  Enzymatic Nucleic Acid
gacagucucugaugaggccguuaggccgaaaaguggug

SEQ ID NO: 9792 - RNA, 38 nt, Artificial Sequence
  Description of Artificial Sequence:  Enzymatic Nucleic Acid
ugacaguccugaugaggccguuaggccgaaaaaguggu

SEQ ID NO: 9793 - RNA, 38 nt, Artificial Sequence
  Description of Artificial Sequence:  Enzymatic Nucleic Acid
auuagcaucugaugaggccguuaggccgaaacagucua

SEQ ID NO: 9794 - RNA, 38 nt, Artificial Sequence
  Description of Artificial Sequence:  Enzymatic Nucleic Acid
gacaccaucugaugaggccguuaggccgaaagcaugac

SEQ ID NO: 9795 - RNA, 38 nt, Artificial Sequence
  Description of Artificial Sequence:  Enzymatic Nucleic Acid
ggcucgggcugaugaggccguuaggccgaaacaccauu

SEQ ID NO: 9796 - RNA, 38 nt, Artificial Sequence
  Description of Artificial Sequence:  Enzymatic Nucleic Acid
agugaucucugaugaggccguuaggccgaaaggcucgg

SEQ ID NO: 9797 - RNA, 38 nt, Artificial Sequence
  Description of Artificial Sequence:  Enzymatic Nucleic Acid
aaccaagucugaugaggccguuaggccgaaaucugagg

SEQ ID NO: 9798 - RNA, 38 nt, Artificial Sequence
  Description of Artificial Sequence:  Enzymatic Nucleic Acid
uuuaaacccugaugaggccguuaggccgaaagugaucu

SEQ ID NO: 9799 - RNA, 38 nt, Artificial Sequence
  Description of Artificial Sequence:  Enzymatic Nucleic Acid
uguuuuuacugaugaggccguuaggccgaaaccaagug

SEQ ID NO: 9800 - RNA, 38 nt, Artificial Sequence
  Description of Artificial Sequence:  Enzymatic Nucleic Acid
uuguuuuucugaugaggccguuaggccgaaaaccaagu

SEQ ID NO: 9801 - RNA, 38 nt, Artificial Sequence
  Description of Artificial Sequence:  Enzymatic Nucleic Acid
guuguuuucugaugaggccguuaggccgaaaaaccaag

SEQ ID NO: 9802 - RNA, 38 nt, Artificial Sequence
  Description of Artificial Sequence:  Enzymatic Nucleic Acid
ucuuguugcugaugaggccguuaggccgaaauuuugug

SEQ ID NO: 9803 - RNA, 38 nt, Artificial Sequence
  Description of Artificial Sequence:  Enzymatic Nucleic Acid
ccuaaaaucugaugaggccguuaggccgaaauuccagg

SEQ ID NO: 9804 - RNA, 38 nt, Artificial Sequence
  Description of Artificial Sequence:  Enzymatic Nucleic Acid
uccuaaaacugaugaggccguuaggccgaaaauuccag

SEQ ID NO: 9805 - RNA, 38 nt, Artificial Sequence
  Description of Artificial Sequence:  Enzymatic Nucleic Acid
gguccuaacugaugaggccguuaggccgaaauaauucc

SEQ ID NO: 9806 - RNA, 38 nt, Artificial Sequence
  Description of Artificial Sequence:  Enzymatic Nucleic Acid
ugguccuacugaugaggccguuaggccgaaaauaauuc

SEQ ID NO: 9807 - RNA, 38 nt, Artificial Sequence
  Description of Artificial Sequence:  Enzymatic Nucleic Acid
cugguccucugaugaggccguuaggccgaaaaauaauu

SEQ ID NO: 9808 - RNA, 38 nt, Artificial Sequence
  Description of Artificial Sequence:  Enzymatic Nucleic Acid
ccuggucccugaugaggccguuaggccgaaaaaauaau

SEQ ID NO: 9809 - RNA, 38 nt, Artificial Sequence
  Description of Artificial Sequence:  Enzymatic Nucleic Acid
uuucaauacugaugaggccguuaggccgaaacagcgug

SEQ ID NO: 9810 - RNA, 38 nt, Artificial Sequence
  Description of Artificial Sequence:  Enzymatic Nucleic Acid
cuuucaaucugaugaggccguuaggccgaaaacagcgu

SEQ ID NO: 9811 - RNA, 38 nt, Artificial Sequence
  Description of Artificial Sequence:  Enzymatic Nucleic Acid
ucuuucaacugaugaggccguuaggccgaaaaacagcg

SEQ ID NO: 9812 - RNA, 38 nt, Artificial Sequence
  Description of Artificial Sequence:  Enzymatic Nucleic Acid
acucuuuccugaugaggccguuaggccgaaauaaacag

SEQ ID NO: 9813 - RNA, 38 nt, Artificial Sequence
  Description of Artificial Sequence:  Enzymatic Nucleic Acid
ucuucugucugaugaggccguuaggccgaaacucuuuc

SEQ ID NO: 9814 - RNA, 38 nt, Artificial Sequence
  Description of Artificial Sequence:  Enzymatic Nucleic Acid
cagugauacugaugaggccguuaggccgaaacaccuuc

SEQ ID NO: 9815 - RNA, 38 nt, Artificial Sequence
  Description of Artificial Sequence:  Enzymatic Nucleic Acid
ugcagugacugaugaggccguuaggccgaaagacaccu

SEQ ID NO: 9816 - RNA, 38 nt, Artificial Sequence
  Description of Artificial Sequence:  Enzymatic Nucleic Acid
uuugcagucugaugaggccguuaggccgaaauagacac

SEQ ID NO: 9817 - RNA, 38 nt, Artificial Sequence
  Description of Artificial Sequence:  Enzymatic Nucleic Acid
uuuccacacugaugaggccguuaggccgaaagcccuuc

SEQ ID NO: 9818 - RNA, 38 nt, Artificial Sequence
  Description of Artificial Sequence:  Enzymatic Nucleic Acid
guaugcugcugaugaggccguuaggccgaaacuuucca

SEQ ID NO: 9819 - RNA, 38 nt, Artificial Sequence
  Description of Artificial Sequence:  Enzymatic Nucleic Acid
gguaugcucugaugaggccguuaggccgaaaacuuucc

SEQ ID NO: 9820 - RNA, 38 nt, Artificial Sequence
  Description of Artificial Sequence:  Enzymatic Nucleic Acid
cagugaggcugaugaggccguuaggccgaaaugcugaa

SEQ ID NO: 9821 - RNA, 38 nt, Artificial Sequence
  Description of Artificial Sequence:  Enzymatic Nucleic Acid
ugaacagucugaugaggccguuaggccgaaagguaugc

SEQ ID NO: 9822 - RNA, 38 nt, Artificial Sequence
  Description of Artificial Sequence:  Enzymatic Nucleic Acid
guuccuugcugaugaggccguuaggccgaaacagugag

SEQ ID NO: 9823 - RNA, 38 nt, Artificial Sequence
  Description of Artificial Sequence:  Enzymatic Nucleic Acid
gguuccuucugaugaggccguuaggccgaaaacaguga

SEQ ID NO: 9824 - RNA, 38 nt, Artificial Sequence
  Description of Artificial Sequence:  Enzymatic Nucleic Acid
acuugucccugaugaggccguuaggccgaaagguuccu

SEQ ID NO: 9825 - RNA, 38 nt, Artificial Sequence
  Description of Artificial Sequence:  Enzymatic Nucleic Acid
ccagauuacugaugaggccguuaggccgaaacuugucc

SEQ ID NO: 9826 - RNA, 38 nt, Artificial Sequence
  Description of Artificial Sequence:  Enzymatic Nucleic Acid
cuccagaucugaugaggccguuaggccgaaagacuugu

SEQ ID NO: 9827 - RNA, 38 nt, Artificial Sequence
  Description of Artificial Sequence:  Enzymatic Nucleic Acid
cagcuccacugaugaggccguuaggccgaaauuagacu

SEQ ID NO: 9828 - RNA, 38 nt, Artificial Sequence
  Description of Artificial Sequence:  Enzymatic Nucleic Acid
guuagagucugaugaggccguuaggccgaaaucagcuc

SEQ ID NO: 9829 - RNA, 38 nt, Artificial Sequence
  Description of Artificial Sequence:  Enzymatic Nucleic Acid
gcauguuacugaugaggccguuaggccgaaagugauca

SEQ ID NO: 9830 - RNA, 38 nt, Artificial Sequence
  Description of Artificial Sequence:  Enzymatic Nucleic Acid
gugcaugucugaugaggccguuaggccgaaagagugau

SEQ ID NO: 9831 - RNA, 38 nt, Artificial Sequence
  Description of Artificial Sequence:  Enzymatic Nucleic Acid
ccagaagacugaugaggccguuaggccgaaagucgcag

SEQ ID NO: 9832 - RNA, 38 nt, Artificial Sequence
  Description of Artificial Sequence:  Enzymatic Nucleic Acid
agccagaacugaugaggccguuaggccgaaagagucgc

SEQ ID NO: 9833 - RNA, 38 nt, Artificial Sequence
  Description of Artificial Sequence:  Enzymatic Nucleic Acid
ggagccagcugaugaggccguuaggccgaaagagaguc

SEQ ID NO: 9834 - RNA, 38 nt, Artificial Sequence
  Description of Artificial Sequence:  Enzymatic Nucleic Acid
aggagccacugaugaggccguuaggccgaaaagagagu

SEQ ID NO: 9835 - RNA, 38 nt, Artificial Sequence
  Description of Artificial Sequence:  Enzymatic Nucleic Acid
guuaauagcugaugaggccguuaggccgaaagccagaa

SEQ ID NO: 9836 - RNA, 38 nt, Artificial Sequence
  Description of Artificial Sequence:  Enzymatic Nucleic Acid
aggguuaacugaugaggccguuaggccgaaaggagcca

SEQ ID NO: 9837 - RNA, 38 nt, Artificial Sequence
  Description of Artificial Sequence:  Enzymatic Nucleic Acid
ggaggguucugaugaggccguuaggccgaaauaggagc

SEQ ID NO: 9838 - RNA, 38 nt, Artificial Sequence
  Description of Artificial Sequence:  Enzymatic Nucleic Acid
aggagggucugaugaggccguuaggccgaaaauaggag

SEQ ID NO: 9839 - RNA, 38 nt, Artificial Sequence
  Description of Artificial Sequence:  Enzymatic Nucleic Acid
cggauaagcugaugaggccguuaggccgaaaggguuaa

SEQ ID NO: 9840 - RNA, 38 nt, Artificial Sequence
  Description of Artificial Sequence:  Enzymatic Nucleic Acid
uuucggaucugaugaggccguuaggccgaaaggagggu

SEQ ID NO: 9841 - RNA, 38 nt, Artificial Sequence
  Description of Artificial Sequence:  Enzymatic Nucleic Acid
uuuucggacugaugaggccguuaggccgaaaaggaggg

SEQ ID NO: 9842 - RNA, 38 nt, Artificial Sequence
  Description of Artificial Sequence:  Enzymatic Nucleic Acid
auuuuucgcugaugaggccguuaggccgaaauaaggag

SEQ ID NO: 9843 - RNA, 38 nt, Artificial Sequence
  Description of Artificial Sequence:  Enzymatic Nucleic Acid
cagaagaacugaugaggccguuaggccgaaaccuuuuc

SEQ ID NO: 9844 - RNA, 38 nt, Artificial Sequence
  Description of Artificial Sequence:  Enzymatic Nucleic Acid
uucagaagcugaugaggccguuaggccgaaagaccuuu

SEQ ID NO: 9845 - RNA, 38 nt, Artificial Sequence
  Description of Artificial Sequence:  Enzymatic Nucleic Acid
uuucagaacugaugaggccguuaggccgaaaagaccuu

SEQ ID NO: 9846 - RNA, 38 nt, Artificial Sequence
  Description of Artificial Sequence:  Enzymatic Nucleic Acid
uauuucagcugaugaggccguuaggccgaaagaagacc

SEQ ID NO: 9847 - RNA, 38 nt, Artificial Sequence
  Description of Artificial Sequence:  Enzymatic Nucleic Acid
uuauuucacugaugaggccguuaggccgaaaagaagac

SEQ ID NO: 9848 - RNA, 38 nt, Artificial Sequence
  Description of Artificial Sequence:  Enzymatic Nucleic Acid
ucagucuucugaugaggccguuaggccgaaauuucaga

SEQ ID NO: 9849 - RNA, 38 nt, Artificial Sequence
  Description of Artificial Sequence:  Enzymatic Nucleic Acid
uugauaggcugaugaggccguuaggccgaaagucaguc

SEQ ID NO: 9850 - RNA, 38 nt, Artificial Sequence
  Description of Artificial Sequence:  Enzymatic Nucleic Acid
auaauugacugaugaggccguuaggccgaaagguaguc

SEQ ID NO: 9851 - RNA, 38 nt, Artificial Sequence
  Description of Artificial Sequence:  Enzymatic Nucleic Acid
uuauaauucugaugaggccguuaggccgaaauagguag

SEQ ID NO: 9852 - RNA, 38 nt, Artificial Sequence
  Description of Artificial Sequence:  Enzymatic Nucleic Acid
uccauuaucugaugaggccguuaggccgaaauugauag

SEQ ID NO: 9853 - RNA, 38 nt, Artificial Sequence
  Description of Artificial Sequence:  Enzymatic Nucleic Acid
guccauuacugaugaggccguuaggccgaaaauugaua

SEQ ID NO: 9854 - RNA, 38 nt, Artificial Sequence
  Description of Artificial Sequence:  Enzymatic Nucleic Acid
ggguccaucugaugaggccguuaggccgaaauaauuga

SEQ ID NO: 9855 - RNA, 38 nt, Artificial Sequence
  Description of Artificial Sequence:  Enzymatic Nucleic Acid
uccaaaggcugaugaggccguuaggccgaaacuucauc

SEQ ID NO: 9856 - RNA, 38 nt, Artificial Sequence
  Description of Artificial Sequence:  Enzymatic Nucleic Acid
auccaaagcugaugaggccguuaggccgaaaacuucau

SEQ ID NO: 9857 - RNA, 38 nt, Artificial Sequence
  Description of Artificial Sequence:  Enzymatic Nucleic Acid
cucauccacugaugaggccguuaggccgaaaggaacuu

SEQ ID NO: 9858 - RNA, 38 nt, Artificial Sequence
  Description of Artificial Sequence:  Enzymatic Nucleic Acid
gcucaucccugaugaggccguuaggccgaaaaggaacu

SEQ ID NO: 9859 - RNA, 38 nt, Artificial Sequence
  Description of Artificial Sequence:  Enzymatic Nucleic Acid
ucauaaggcugaugaggccguuaggccgaaagccgcuc

SEQ ID NO: 9860 - RNA, 38 nt, Artificial Sequence
  Description of Artificial Sequence:  Enzymatic Nucleic Acid
ggcaucaucugaugaggccguuaggccgaaagggagcc

SEQ ID NO: 9861 - RNA, 38 nt, Artificial Sequence
  Description of Artificial Sequence:  Enzymatic Nucleic Acid
uggcaucacugaugaggccguuaggccgaaaagggagc

SEQ ID NO: 9862 - RNA, 38 nt, Artificial Sequence
  Description of Artificial Sequence:  Enzymatic Nucleic Acid
cccgggcacugaugaggccguuaggccgaaacucccac

SEQ ID NO: 9863 - RNA, 38 nt, Artificial Sequence
  Description of Artificial Sequence:  Enzymatic Nucleic Acid
ucccgggccugaugaggccguuaggccgaaaacuccca

SEQ ID NO: 9864 - RNA, 38 nt, Artificial Sequence
  Description of Artificial Sequence:  Enzymatic Nucleic Acid
cccaguuucugaugaggccguuaggccgaaagucucuc

SEQ ID NO: 9865 - RNA, 38 nt, Artificial Sequence
  Description of Artificial Sequence:  Enzymatic Nucleic Acid
gcccaguucugaugaggccguuaggccgaaaagucucu

SEQ ID NO: 9866 - RNA, 38 nt, Artificial Sequence
  Description of Artificial Sequence:  Enzymatic Nucleic Acid
uuccaagucugaugaggccguuaggccgaaauuugccc

SEQ ID NO: 9867 - RNA, 38 nt, Artificial Sequence
  Description of Artificial Sequence:  Enzymatic Nucleic Acid
ccucuucccugaugaggccguuaggccgaaagugauuu

SEQ ID NO: 9868 - RNA, 38 nt, Artificial Sequence
  Description of Artificial Sequence:  Enzymatic Nucleic Acid
uuuuccaacugaugaggccguuaggccgaaagccccuc

SEQ ID NO: 9869 - RNA, 38 nt, Artificial Sequence
  Description of Artificial Sequence:  Enzymatic Nucleic Acid
cuuuuccacugaugaggccguuaggccgaaaagccccu

SEQ ID NO: 9870 - RNA, 38 nt, Artificial Sequence
  Description of Artificial Sequence:  Enzymatic Nucleic Acid
acuuuucccugaugaggccguuaggccgaaaaagcccc

SEQ ID NO: 9871 - RNA, 38 nt, Artificial Sequence
  Description of Artificial Sequence:  Enzymatic Nucleic Acid
gaugcuugcugaugaggccguuaggccgaaaccacuuu

SEQ ID NO: 9872 - RNA, 38 nt, Artificial Sequence
  Description of Artificial Sequence:  Enzymatic Nucleic Acid
ugaugcuucugaugaggccguuaggccgaaaaccacuu

SEQ ID NO: 9873 - RNA, 38 nt, Artificial Sequence
  Description of Artificial Sequence:  Enzymatic Nucleic Acid
caaaugcucugaugaggccguuaggccgaaaugcuuga

SEQ ID NO: 9874 - RNA, 38 nt, Artificial Sequence
  Description of Artificial Sequence:  Enzymatic Nucleic Acid
uaaugccacugaugaggccguuaggccgaaaugcugau

SEQ ID NO: 9875 - RNA, 38 nt, Artificial Sequence
  Description of Artificial Sequence:  Enzymatic Nucleic Acid
uuaaugcccugaugaggccguuaggccgaaaaugcuga

SEQ ID NO: 9876 - RNA, 38 nt, Artificial Sequence
  Description of Artificial Sequence:  Enzymatic Nucleic Acid
gauuucuucugaugaggccguuaggccgaaaugccaaa

SEQ ID NO: 9877 - RNA, 38 nt, Artificial Sequence
  Description of Artificial Sequence:  Enzymatic Nucleic Acid
ugauuucucugaugaggccguuaggccgaaaaugccaa

SEQ ID NO: 9878 - RNA, 38 nt, Artificial Sequence
  Description of Artificial Sequence:  Enzymatic Nucleic Acid
acguaggucugaugaggccguuaggccgaaauuucuua

SEQ ID NO: 9879 - RNA, 38 nt, Artificial Sequence
  Description of Artificial Sequence:  Enzymatic Nucleic Acid
ccggcacgcugaugaggccguuaggccgaaaggugauu

SEQ ID NO: 9880 - RNA, 38 nt, Artificial Sequence
  Description of Artificial Sequence:  Enzymatic Nucleic Acid
gagcuuugcugaugaggccguuaggccgaaacucgcug

SEQ ID NO: 9881 - RNA, 38 nt, Artificial Sequence
  Description of Artificial Sequence:  Enzymatic Nucleic Acid
agucaucacugaugaggccguuaggccgaaagcuuugu

SEQ ID NO: 9882 - RNA, 38 nt, Artificial Sequence
  Description of Artificial Sequence:  Enzymatic Nucleic Acid
aagauuuucugaugaggccguuaggccgaaagcucagu

SEQ ID NO: 9883 - RNA, 38 nt, Artificial Sequence
  Description of Artificial Sequence:  Enzymatic Nucleic Acid
ugggucaacugaugaggccguuaggccgaaauuuuuag

SEQ ID NO: 9884 - RNA, 38 nt, Artificial Sequence
  Description of Artificial Sequence:  Enzymatic Nucleic Acid
uguggguccugaugaggccguuaggccgaaagauuuuu

SEQ ID NO: 9885 - RNA, 38 nt, Artificial Sequence
  Description of Artificial Sequence:  Enzymatic Nucleic Acid
ugguggcccugaugaggccguuaggccgaaaugugggu

SEQ ID NO: 9886 - RNA, 38 nt, Artificial Sequence
  Description of Artificial Sequence:  Enzymatic Nucleic Acid
cacguucacugaugaggccguuaggccgaaaugguggc

SEQ ID NO: 9887 - RNA, 38 nt, Artificial Sequence
  Description of Artificial Sequence:  Enzymatic Nucleic Acid
agcagguucugaugaggccguuaggccgaaaccacguu

SEQ ID NO: 9888 - RNA, 38 nt, Artificial Sequence
  Description of Artificial Sequence:  Enzymatic Nucleic Acid
cagcaggucugaugaggccguuaggccgaaaaccacgu

SEQ ID NO: 9889 - RNA, 38 nt, Artificial Sequence
  Description of Artificial Sequence:  Enzymatic Nucleic Acid
caccaucacugaugaggccguuaggccgaaaggcccuc

SEQ ID NO: 9890 - RNA, 38 nt, Artificial Sequence
  Description of Artificial Sequence:  Enzymatic Nucleic Acid
uauucaaccugaugaggccguuaggccgaaaucaccau

SEQ ID NO: 9891 - RNA, 38 nt, Artificial Sequence
  Description of Artificial Sequence:  Enzymatic Nucleic Acid
caguauuccugaugaggccguuaggccgaaacaaucac

SEQ ID NO: 9892 - RNA, 38 nt, Artificial Sequence
  Description of Artificial Sequence:  Enzymatic Nucleic Acid
auuugcagcugaugaggccguuaggccgaaauucaaca

SEQ ID NO: 9893 - RNA, 38 nt, Artificial Sequence
  Description of Artificial Sequence:  Enzymatic Nucleic Acid
gauuuccacugaugaggccguuaggccgaaauuugcag

SEQ ID NO: 9894 - RNA, 38 nt, Artificial Sequence
  Description of Artificial Sequence:  Enzymatic Nucleic Acid
guuggagacugaugaggccguuaggccgaaauuuccau

SEQ ID NO: 9895 - RNA, 38 nt, Artificial Sequence
  Description of Artificial Sequence:  Enzymatic Nucleic Acid
uaguuggacugaugaggccguuaggccgaaagauuucc

SEQ ID NO: 9896 - RNA, 38 nt, Artificial Sequence
  Description of Artificial Sequence:  Enzymatic Nucleic Acid
gguaguugcugaugaggccguuaggccgaaagagauuu

SEQ ID NO: 9897 - RNA, 38 nt, Artificial Sequence
  Description of Artificial Sequence:  Enzymatic Nucleic Acid
ucuugaggcugaugaggccguuaggccgaaaguuggag

SEQ ID NO: 9898 - RNA, 38 nt, Artificial Sequence
  Description of Artificial Sequence:  Enzymatic Nucleic Acid
uugcucuucugaugaggccguuaggccgaaagguaguu

SEQ ID NO: 9899 - RNA, 38 nt, Artificial Sequence
  Description of Artificial Sequence:  Enzymatic Nucleic Acid
gaaaaaaucugaugaggccguuaggccgaaagucacgu

SEQ ID NO: 9900 - RNA, 38 nt, Artificial Sequence
  Description of Artificial Sequence:  Enzymatic Nucleic Acid
agaaaaaacugaugaggccguuaggccgaaaagucacg

SEQ ID NO: 9901 - RNA, 38 nt, Artificial Sequence
  Description of Artificial Sequence:  Enzymatic Nucleic Acid
ugagaaaacugaugaggccguuaggccgaaauaaguca

SEQ ID NO: 9902 - RNA, 38 nt, Artificial Sequence
  Description of Artificial Sequence:  Enzymatic Nucleic Acid
uugagaaacugaugaggccguuaggccgaaaauaaguc

SEQ ID NO: 9903 - RNA, 38 nt, Artificial Sequence
  Description of Artificial Sequence:  Enzymatic Nucleic Acid
guugagaacugaugaggccguuaggccgaaaaauaagu

SEQ ID NO: 9904 - RNA, 38 nt, Artificial Sequence
  Description of Artificial Sequence:  Enzymatic Nucleic Acid
uguugagacugaugaggccguuaggccgaaaaaauaag

SEQ ID NO: 9905 - RNA, 38 nt, Artificial Sequence
  Description of Artificial Sequence:  Enzymatic Nucleic Acid
uuguugagcugaugaggccguuaggccgaaaaaaauaa

SEQ ID NO: 9906 - RNA, 38 nt, Artificial Sequence
  Description of Artificial Sequence:  Enzymatic Nucleic Acid
cuuguugacugaugaggccguuaggccgaaaaaaaaua

SEQ ID NO: 9907 - RNA, 38 nt, Artificial Sequence
  Description of Artificial Sequence:  Enzymatic Nucleic Acid
uccuuguucugaugaggccguuaggccgaaagaaaaaa

SEQ ID NO: 9908 - RNA, 38 nt, Artificial Sequence
  Description of Artificial Sequence:  Enzymatic Nucleic Acid
uccaugugcugaugaggccguuaggccgaaagugcugc

SEQ ID NO: 9909 - RNA, 38 nt, Artificial Sequence
  Description of Artificial Sequence:  Enzymatic Nucleic Acid
uucuuucucugaugaggccguuaggccgaaaggcucca

SEQ ID NO: 9910 - RNA, 38 nt, Artificial Sequence
  Description of Artificial Sequence:  Enzymatic Nucleic Acid
acgcuauccugaugaggccguuaggccgaaagucuugg

SEQ ID NO: 9911 - RNA, 38 nt, Artificial Sequence
  Description of Artificial Sequence:  Enzymatic Nucleic Acid
ggugacgccugaugaggccguuaggccgaaaucuaguc

SEQ ID NO: 9912 - RNA, 38 nt, Artificial Sequence
  Description of Artificial Sequence:  Enzymatic Nucleic Acid
cugcuggucugaugaggccguuaggccgaaacgcuauc

SEQ ID NO: 9913 - RNA, 38 nt, Artificial Sequence
  Description of Artificial Sequence:  Enzymatic Nucleic Acid
agcucgcacugaugaggccguuaggccgaaagcuuucg

SEQ ID NO: 9914 - RNA, 38 nt, Artificial Sequence
  Description of Artificial Sequence:  Enzymatic Nucleic Acid
gagcucgccugaugaggccguuaggccgaaaagcuuuc

SEQ ID NO: 9915 - RNA, 38 nt, Artificial Sequence
  Description of Artificial Sequence:  Enzymatic Nucleic Acid
gaaagccgcugaugaggccguuaggccgaaagcucgca

SEQ ID NO: 9916 - RNA, 38 nt, Artificial Sequence
  Description of Artificial Sequence:  Enzymatic Nucleic Acid
cuuccugacugaugaggccguuaggccgaaagccggag

SEQ ID NO: 9917 - RNA, 38 nt, Artificial Sequence
  Description of Artificial Sequence:  Enzymatic Nucleic Acid
ucuuccugcugaugaggccguuaggccgaaaagccgga

SEQ ID NO: 9918 - RNA, 38 nt, Artificial Sequence
  Description of Artificial Sequence:  Enzymatic Nucleic Acid
aucuuccucugaugaggccguuaggccgaaaaagccgg

SEQ ID NO: 9919 - RNA, 38 nt, Artificial Sequence
  Description of Artificial Sequence:  Enzymatic Nucleic Acid
cagacuuucugaugaggccguuaggccgaaaucuuccu

SEQ ID NO: 9920 - RNA, 38 nt, Artificial Sequence
  Description of Artificial Sequence:  Enzymatic Nucleic Acid
aucacucacugaugaggccguuaggccgaaacuuuuau

SEQ ID NO: 9921 - RNA, 38 nt, Artificial Sequence
  Description of Artificial Sequence:  Enzymatic Nucleic Acid
ucuuccuccugaugaggccguuaggccgaaacaucacu

SEQ ID NO: 9922 - RNA, 38 nt, Artificial Sequence
  Description of Artificial Sequence:  Enzymatic Nucleic Acid
accgucagcugaugaggccguuaggccgaaauccuccu

SEQ ID NO: 9923 - RNA, 38 nt, Artificial Sequence
  Description of Artificial Sequence:  Enzymatic Nucleic Acid
aaccgucacugaugaggccguuaggccgaaaauccucc

SEQ ID NO: 9924 - RNA, 38 nt, Artificial Sequence
  Description of Artificial Sequence:  Enzymatic Nucleic Acid
cuuguagacugaugaggccguuaggccgaaaccgucag

SEQ ID NO: 9925 - RNA, 38 nt, Artificial Sequence
  Description of Artificial Sequence:  Enzymatic Nucleic Acid
ccuuguagcugaugaggccguuaggccgaaaaccguca

SEQ ID NO: 9926 - RNA, 38 nt, Artificial Sequence
  Description of Artificial Sequence:  Enzymatic Nucleic Acid
uccuuguacugaugaggccguuaggccgaaaaaccguc

SEQ ID NO: 9927 - RNA, 38 nt, Artificial Sequence
  Description of Artificial Sequence:  Enzymatic Nucleic Acid
gcuccuugcugaugaggccguuaggccgaaagaaaccg

SEQ ID NO: 9928 - RNA, 38 nt, Artificial Sequence
  Description of Artificial Sequence:  Enzymatic Nucleic Acid
uccauagucugaugaggccguuaggccgaaaugggcuc

SEQ ID NO: 9929 - RNA, 38 nt, Artificial Sequence
  Description of Artificial Sequence:  Enzymatic Nucleic Acid
aucuuccacugaugaggccguuaggccgaaagugaugg

SEQ ID NO: 9930 - RNA, 38 nt, Artificial Sequence
  Description of Artificial Sequence:  Enzymatic Nucleic Acid
agaaaucacugaugaggccguuaggccgaaaucuucca

SEQ ID NO: 9931 - RNA, 38 nt, Artificial Sequence
  Description of Artificial Sequence:  Enzymatic Nucleic Acid
cuguaagacugaugaggccguuaggccgaaaucagauc

SEQ ID NO: 9932 - RNA, 38 nt, Artificial Sequence
  Description of Artificial Sequence:  Enzymatic Nucleic Acid
acuguaagcugaugaggccguuaggccgaaaaucagau

SEQ ID NO: 9933 - RNA, 38 nt, Artificial Sequence
  Description of Artificial Sequence:  Enzymatic Nucleic Acid
aacuguaacugaugaggccguuaggccgaaaaaucaga

SEQ ID NO: 9934 - RNA, 38 nt, Artificial Sequence
  Description of Artificial Sequence:  Enzymatic Nucleic Acid
aaaacugucugaugaggccguuaggccgaaagaaauca

SEQ ID NO: 9935 - RNA, 38 nt, Artificial Sequence
  Description of Artificial Sequence:  Enzymatic Nucleic Acid
gaaaacugcugaugaggccguuaggccgaaaagaaauc

SEQ ID NO: 9936 - RNA, 38 nt, Artificial Sequence
  Description of Artificial Sequence:  Enzymatic Nucleic Acid
cacuugaacugaugaggccguuaggccgaaacuguaag

SEQ ID NO: 9937 - RNA, 38 nt, Artificial Sequence
  Description of Artificial Sequence:  Enzymatic Nucleic Acid
ccacuugacugaugaggccguuaggccgaaaacuguaa

SEQ ID NO: 9938 - RNA, 38 nt, Artificial Sequence
  Description of Artificial Sequence:  Enzymatic Nucleic Acid
gccacuugcugaugaggccguuaggccgaaaaacugua

SEQ ID NO: 9939 - RNA, 38 nt, Artificial Sequence
  Description of Artificial Sequence:  Enzymatic Nucleic Acid
ggccacuucugaugaggccguuaggccgaaaaaacugu

SEQ ID NO: 9940 - RNA, 38 nt, Artificial Sequence
  Description of Artificial Sequence:  Enzymatic Nucleic Acid
aagacaggcugaugaggccguuaggccgaaacuccaug

SEQ ID NO: 9941 - RNA, 38 nt, Artificial Sequence
  Description of Artificial Sequence:  Enzymatic Nucleic Acid
gaagacagcugaugaggccguuaggccgaaaacuccau

SEQ ID NO: 9942 - RNA, 38 nt, Artificial Sequence
  Description of Artificial Sequence:  Enzymatic Nucleic Acid
uucuggaacugaugaggccguuaggccgaaacaggaac

SEQ ID NO: 9943 - RNA, 38 nt, Artificial Sequence
  Description of Artificial Sequence:  Enzymatic Nucleic Acid
cuuucuggcugaugaggccguuaggccgaaagacagga

SEQ ID NO: 9944 - RNA, 38 nt, Artificial Sequence
  Description of Artificial Sequence:  Enzymatic Nucleic Acid
acuuucugcugaugaggccguuaggccgaaaagacagg

SEQ ID NO: 9945 - RNA, 38 nt, Artificial Sequence
  Description of Artificial Sequence:  Enzymatic Nucleic Acid
ucccgaugcugaugaggccguuaggccgaaaugcacuu

SEQ ID NO: 9946 - RNA, 38 nt, Artificial Sequence
  Description of Artificial Sequence:  Enzymatic Nucleic Acid
gucccgaucugaugaggccguuaggccgaaaaugcacu

SEQ ID NO: 9947 - RNA, 38 nt, Artificial Sequence
  Description of Artificial Sequence:  Enzymatic Nucleic Acid
cagguccccugaugaggccguuaggccgaaaugaaugc

SEQ ID NO: 9948 - RNA, 38 nt, Artificial Sequence
  Description of Artificial Sequence:  Enzymatic Nucleic Acid
gauaaaagcugaugaggccguuaggccgaaauguuucu

SEQ ID NO: 9949 - RNA, 38 nt, Artificial Sequence
  Description of Artificial Sequence:  Enzymatic Nucleic Acid
agauaaaacugaugaggccguuaggccgaaaauguuuc

SEQ ID NO: 9950 - RNA, 38 nt, Artificial Sequence
  Description of Artificial Sequence:  Enzymatic Nucleic Acid
ucagauaacugaugaggccguuaggccgaaagaauguu

SEQ ID NO: 9951 - RNA, 38 nt, Artificial Sequence
  Description of Artificial Sequence:  Enzymatic Nucleic Acid
cucagauacugaugaggccguuaggccgaaaagaaugu

SEQ ID NO: 9952 - RNA, 38 nt, Artificial Sequence
  Description of Artificial Sequence:  Enzymatic Nucleic Acid
ucucagaucugaugaggccguuaggccgaaaaagaaug

SEQ ID NO: 9953 - RNA, 38 nt, Artificial Sequence
  Description of Artificial Sequence:  Enzymatic Nucleic Acid
uucucagacugaugaggccguuaggccgaaaaaagaau

SEQ ID NO: 9954 - RNA, 38 nt, Artificial Sequence
  Description of Artificial Sequence:  Enzymatic Nucleic Acid
uguucucacugaugaggccguuaggccgaaauaaaaga

SEQ ID NO: 9955 - RNA, 38 nt, Artificial Sequence
  Description of Artificial Sequence:  Enzymatic Nucleic Acid
aaaucacacugaugaggccguuaggccgaaaucuucac

SEQ ID NO: 9956 - RNA, 38 nt, Artificial Sequence
  Description of Artificial Sequence:  Enzymatic Nucleic Acid
aaaaucaccugaugaggccguuaggccgaaaaucuuca

SEQ ID NO: 9957 - RNA, 38 nt, Artificial Sequence
  Description of Artificial Sequence:  Enzymatic Nucleic Acid
aaggccaacugaugaggccguuaggccgaaaucacaaa

SEQ ID NO: 9958 - RNA, 38 nt, Artificial Sequence
  Description of Artificial Sequence:  Enzymatic Nucleic Acid
caaggccacugaugaggccguuaggccgaaaaucacaa

SEQ ID NO: 9959 - RNA, 38 nt, Artificial Sequence
  Description of Artificial Sequence:  Enzymatic Nucleic Acid
gcaaggcccugaugaggccguuaggccgaaaaaucaca

SEQ ID NO: 9960 - RNA, 38 nt, Artificial Sequence
  Description of Artificial Sequence:  Enzymatic Nucleic Acid
ucccgggccugaugaggccguuaggccgaaaggccaaa

SEQ ID NO: 9961 - RNA, 38 nt, Artificial Sequence
  Description of Artificial Sequence:  Enzymatic Nucleic Acid
cuuauaaacugaugaggccguuaggccgaaaucccggg

SEQ ID NO: 9962 - RNA, 38 nt, Artificial Sequence
  Description of Artificial Sequence:  Enzymatic Nucleic Acid
uucuuauacugaugaggccguuaggccgaaauaucccg

SEQ ID NO: 9963 - RNA, 38 nt, Artificial Sequence
  Description of Artificial Sequence:  Enzymatic Nucleic Acid
guucuuaucugaugaggccguuaggccgaaaauauccc

SEQ ID NO: 9964 - RNA, 38 nt, Artificial Sequence
  Description of Artificial Sequence:  Enzymatic Nucleic Acid
gguucuuacugaugaggccguuaggccgaaaaauaucc

SEQ ID NO: 9965 - RNA, 38 nt, Artificial Sequence
  Description of Artificial Sequence:  Enzymatic Nucleic Acid
gggguucucugaugaggccguuaggccgaaauaaauau

SEQ ID NO: 9966 - RNA, 38 nt, Artificial Sequence
  Description of Artificial Sequence:  Enzymatic Nucleic Acid
ucucacaucugaugaggccguuaggccgaaaucggggu

SEQ ID NO: 9967 - RNA, 38 nt, Artificial Sequence
  Description of Artificial Sequence:  Enzymatic Nucleic Acid
uucucacacugaugaggccguuaggccgaaaaucgggg

SEQ ID NO: 9968 - RNA, 38 nt, Artificial Sequence
  Description of Artificial Sequence:  Enzymatic Nucleic Acid
aagucgagcugaugaggccguuaggccgaaaucuccuu

SEQ ID NO: 9969 - RNA, 38 nt, Artificial Sequence
  Description of Artificial Sequence:  Enzymatic Nucleic Acid
aggaaguccugaugaggccguuaggccgaaaguaucuc

SEQ ID NO: 9970 - RNA, 38 nt, Artificial Sequence
  Description of Artificial Sequence:  Enzymatic Nucleic Acid
uucagaggcugaugaggccguuaggccgaaagucgagu

SEQ ID NO: 9971 - RNA, 38 nt, Artificial Sequence
  Description of Artificial Sequence:  Enzymatic Nucleic Acid
uuucagagcugaugaggccguuaggccgaaaagucgag

SEQ ID NO: 9972 - RNA, 38 nt, Artificial Sequence
  Description of Artificial Sequence:  Enzymatic Nucleic Acid
ccauuucacugaugaggccguuaggccgaaaggaaguc

SEQ ID NO: 9973 - RNA, 38 nt, Artificial Sequence
  Description of Artificial Sequence:  Enzymatic Nucleic Acid
agauucggcugaugaggccguuaggccgaaagccaucc

SEQ ID NO: 9974 - RNA, 38 nt, Artificial Sequence
  Description of Artificial Sequence:  Enzymatic Nucleic Acid
caaagauacugaugaggccguuaggccgaaauucggga

SEQ ID NO: 9975 - RNA, 38 nt, Artificial Sequence
  Description of Artificial Sequence:  Enzymatic Nucleic Acid
gucaaagacugaugaggccguuaggccgaaagauucgg

SEQ ID NO: 9976 - RNA, 38 nt, Artificial Sequence
  Description of Artificial Sequence:  Enzymatic Nucleic Acid
uugucaaacugaugaggccguuaggccgaaauagauuc

SEQ ID NO: 9977 - RNA, 38 nt, Artificial Sequence
  Description of Artificial Sequence:  Enzymatic Nucleic Acid
uuuugucacugaugaggccguuaggccgaaagauagau

SEQ ID NO: 9978 - RNA, 38 nt, Artificial Sequence
  Description of Artificial Sequence:  Enzymatic Nucleic Acid
auuuuguccugaugaggccguuaggccgaaaagauaga

SEQ ID NO: 9979 - RNA, 38 nt, Artificial Sequence
  Description of Artificial Sequence:  Enzymatic Nucleic Acid
gugcuguacugaugaggccguuaggccgaaauuuuguc

SEQ ID NO: 9980 - RNA, 38 nt, Artificial Sequence
  Description of Artificial Sequence:  Enzymatic Nucleic Acid
uggugcugcugaugaggccguuaggccgaaagauuuug

SEQ ID NO: 9981 - RNA, 38 nt, Artificial Sequence
  Description of Artificial Sequence:  Enzymatic Nucleic Acid
cuccguaacugaugaggccguuaggccgaaaccacacg

SEQ ID NO: 9982 - RNA, 38 nt, Artificial Sequence
  Description of Artificial Sequence:  Enzymatic Nucleic Acid
uacuccgucugaugaggccguuaggccgaaagaccaca

SEQ ID NO: 9983 - RNA, 38 nt, Artificial Sequence
  Description of Artificial Sequence:  Enzymatic Nucleic Acid
auacuccgcugaugaggccguuaggccgaaaagaccac

SEQ ID NO: 9984 - RNA, 38 nt, Artificial Sequence
  Description of Artificial Sequence:  Enzymatic Nucleic Acid
cacagcaacugaugaggccguuaggccgaaacuccgua

SEQ ID NO: 9985 - RNA, 38 nt, Artificial Sequence
  Description of Artificial Sequence:  Enzymatic Nucleic Acid
cccacagccugaugaggccguuaggccgaaauacuccg

SEQ ID NO: 9986 - RNA, 38 nt, Artificial Sequence
  Description of Artificial Sequence:  Enzymatic Nucleic Acid
aaggagaacugaugaggccguuaggccgaaauuuccca

SEQ ID NO: 9987 - RNA, 38 nt, Artificial Sequence
  Description of Artificial Sequence:  Enzymatic Nucleic Acid
cuaaggagcugaugaggccguuaggccgaaagauuucc

SEQ ID NO: 9988 - RNA, 38 nt, Artificial Sequence
  Description of Artificial Sequence:  Enzymatic Nucleic Acid
ccuaaggacugaugaggccguuaggccgaaaagauuuc

SEQ ID NO: 9989 - RNA, 38 nt, Artificial Sequence
  Description of Artificial Sequence:  Enzymatic Nucleic Acid
caccuaagcugaugaggccguuaggccgaaagaagauu

SEQ ID NO: 9990 - RNA, 38 nt, Artificial Sequence
  Description of Artificial Sequence:  Enzymatic Nucleic Acid
acccaccucugaugaggccguuaggccgaaaggagaag

SEQ ID NO: 9991 - RNA, 38 nt, Artificial Sequence
  Description of Artificial Sequence:  Enzymatic Nucleic Acid
gacccacccugaugaggccguuaggccgaaaaggagaa

SEQ ID NO: 9992 - RNA, 38 nt, Artificial Sequence
  Description of Artificial Sequence:  Enzymatic Nucleic Acid
gguauggacugaugaggccguuaggccgaaacccaccu

SEQ ID NO: 9993 - RNA, 38 nt, Artificial Sequence
  Description of Artificial Sequence:  Enzymatic Nucleic Acid
uggguaugcugaugaggccguuaggccgaaagacccac

SEQ ID NO: 9994 - RNA, 38 nt, Artificial Sequence
  Description of Artificial Sequence:  Enzymatic Nucleic Acid
cuccugggcugaugaggccguuaggccgaaauggagac

SEQ ID NO: 9995 - RNA, 38 nt, Artificial Sequence
  Description of Artificial Sequence:  Enzymatic Nucleic Acid
uccauuugcugaugaggccguuaggccgaaacuccugg

SEQ ID NO: 9996 - RNA, 38 nt, Artificial Sequence
  Description of Artificial Sequence:  Enzymatic Nucleic Acid
gacugcaacugaugaggccguuaggccgaaaguccuca

SEQ ID NO: 9997 - RNA, 38 nt, Artificial Sequence
  Description of Artificial Sequence:  Enzymatic Nucleic Acid
cgacugcacugaugaggccguuaggccgaaaaguccuc

SEQ ID NO: 9998 - RNA, 38 nt, Artificial Sequence
  Description of Artificial Sequence:  Enzymatic Nucleic Acid
gcgacugccugaugaggccguuaggccgaaaaaguccu

SEQ ID NO: 9999 - RNA, 38 nt, Artificial Sequence
  Description of Artificial Sequence:  Enzymatic Nucleic Acid
ccucaggccugaugaggccguuaggccgaaacugcaaa

SEQ ID NO: 10000 - RNA, 38 nt, Artificial Sequence
  Description of Artificial Sequence:  Enzymatic Nucleic Acid
guacucagcugaugaggccguuaggccgaaagcucuca

SEQ ID NO: 10001 - RNA, 38 nt, Artificial Sequence
  Description of Artificial Sequence:  Enzymatic Nucleic Acid
gaguagagcugaugaggccguuaggccgaaacucagga

SEQ ID NO: 10002 - RNA, 38 nt, Artificial Sequence
  Description of Artificial Sequence:  Enzymatic Nucleic Acid
caggaguacugaugaggccguuaggccgaaaguacuca

SEQ ID NO: 10003 - RNA, 38 nt, Artificial Sequence
  Description of Artificial Sequence:  Enzymatic Nucleic Acid
uucaggagcugaugaggccguuaggccgaaagaguacu

SEQ ID NO: 10004 - RNA, 38 nt, Artificial Sequence
  Description of Artificial Sequence:  Enzymatic Nucleic Acid
gauuucagcugaugaggccguuaggccgaaaguagagu

SEQ ID NO: 10005 - RNA, 38 nt, Artificial Sequence
  Description of Artificial Sequence:  Enzymatic Nucleic Acid
aucugauacugaugaggccguuaggccgaaauuucagg

SEQ ID NO: 10006 - RNA, 38 nt, Artificial Sequence
  Description of Artificial Sequence:  Enzymatic Nucleic Acid
ugaucugacugaugaggccguuaggccgaaagauuuca

SEQ ID NO: 10007 - RNA, 38 nt, Artificial Sequence
  Description of Artificial Sequence:  Enzymatic Nucleic Acid
caugaucucugaugaggccguuaggccgaaauagauuu

SEQ ID NO: 10008 - RNA, 38 nt, Artificial Sequence
  Description of Artificial Sequence:  Enzymatic Nucleic Acid
uccagcaucugaugaggccguuaggccgaaaucugaua

SEQ ID NO: 10009 - RNA, 38 nt, Artificial Sequence
  Description of Artificial Sequence:  Enzymatic Nucleic Acid
guucugcacugaugaggccguuaggccgaaaucuuggc

SEQ ID NO: 10010 - RNA, 38 nt, Artificial Sequence
  Description of Artificial Sequence:  Enzymatic Nucleic Acid
aguucugccugaugaggccguuaggccgaaaaucuugg

SEQ ID NO: 10011 - RNA, 38 nt, Artificial Sequence
  Description of Artificial Sequence:  Enzymatic Nucleic Acid
uuuuccaccugaugaggccguuaggccgaaaguucugc

SEQ ID NO: 10012 - RNA, 38 nt, Artificial Sequence
  Description of Artificial Sequence:  Enzymatic Nucleic Acid
aaaucacccugaugaggccguuaggccgaaaguuuuuc

SEQ ID NO: 10013 - RNA, 38 nt, Artificial Sequence
  Description of Artificial Sequence:  Enzymatic Nucleic Acid
uugaagcacugaugaggccguuaggccgaaaucaccua

SEQ ID NO: 10014 - RNA, 38 nt, Artificial Sequence
  Description of Artificial Sequence:  Enzymatic Nucleic Acid
cuugaagccugaugaggccguuaggccgaaaaucaccu

SEQ ID NO: 10015 - RNA, 38 nt, Artificial Sequence
  Description of Artificial Sequence:  Enzymatic Nucleic Acid
uuugcuugcugaugaggccguuaggccgaaagcaaauc

SEQ ID NO: 10016 - RNA, 38 nt, Artificial Sequence
  Description of Artificial Sequence:  Enzymatic Nucleic Acid
auuugcuucugaugaggccguuaggccgaaaagcaaau

SEQ ID NO: 10017 - RNA, 38 nt, Artificial Sequence
  Description of Artificial Sequence:  Enzymatic Nucleic Acid
uccuguugcugaugaggccguuaggccgaaacauuugc

SEQ ID NO: 10018 - RNA, 38 nt, Artificial Sequence
  Description of Artificial Sequence:  Enzymatic Nucleic Acid
guagucuucugaugaggccguuaggccgaaaccauccu

SEQ ID NO: 10019 - RNA, 38 nt, Artificial Sequence
  Description of Artificial Sequence:  Enzymatic Nucleic Acid
uugggaugcugaugaggccguuaggccgaaagucuuua

SEQ ID NO: 10020 - RNA, 38 nt, Artificial Sequence
  Description of Artificial Sequence:  Enzymatic Nucleic Acid
uugauuggcugaugaggccguuaggccgaaauguaguc

SEQ ID NO: 10021 - RNA, 38 nt, Artificial Sequence
  Description of Artificial Sequence:  Enzymatic Nucleic Acid
auggcauucugaugaggccguuaggccgaaauugggau

SEQ ID NO: 10022 - RNA, 38 nt, Artificial Sequence
  Description of Artificial Sequence:  Enzymatic Nucleic Acid
ccugucagcugaugaggccguuaggccgaaauggcauu

SEQ ID NO: 10023 - RNA, 38 nt, Artificial Sequence
  Description of Artificial Sequence:  Enzymatic Nucleic Acid
aaacccaccugaugaggccguuaggccgaaauuuccug

SEQ ID NO: 10024 - RNA, 38 nt, Artificial Sequence
  Description of Artificial Sequence:  Enzymatic Nucleic Acid
aguauguacugaugaggccguuaggccgaaacccacua

SEQ ID NO: 10025 - RNA, 38 nt, Artificial Sequence
  Description of Artificial Sequence:  Enzymatic Nucleic Acid
gaguaugucugaugaggccguuaggccgaaaacccacu

SEQ ID NO: 10026 - RNA, 38 nt, Artificial Sequence
  Description of Artificial Sequence:  Enzymatic Nucleic Acid
ugaguaugcugaugaggccguuaggccgaaaaacccac

SEQ ID NO: 10027 - RNA, 38 nt, Artificial Sequence
  Description of Artificial Sequence:  Enzymatic Nucleic Acid
gaguugagcugaugaggccguuaggccgaaauguaaac

SEQ ID NO: 10028 - RNA, 38 nt, Artificial Sequence
  Description of Artificial Sequence:  Enzymatic Nucleic Acid
caggaguucugaugaggccguuaggccgaaaguaugua

SEQ ID NO: 10029 - RNA, 38 nt, Artificial Sequence
  Description of Artificial Sequence:  Enzymatic Nucleic Acid
gaaggcagcugaugaggccguuaggccgaaaguugagu

SEQ ID NO: 10030 - RNA, 38 nt, Artificial Sequence
  Description of Artificial Sequence:  Enzymatic Nucleic Acid
ccucagagcugaugaggccguuaggccgaaaggcagga

SEQ ID NO: 10031 - RNA, 38 nt, Artificial Sequence
  Description of Artificial Sequence:  Enzymatic Nucleic Acid
uccucagacugaugaggccguuaggccgaaaaggcagg

SEQ ID NO: 10032 - RNA, 38 nt, Artificial Sequence
  Description of Artificial Sequence:  Enzymatic Nucleic Acid
aguccucacugaugaggccguuaggccgaaagaaggca

SEQ ID NO: 10033 - RNA, 38 nt, Artificial Sequence
  Description of Artificial Sequence:  Enzymatic Nucleic Acid
ccuugaagcugaugaggccguuaggccgaaaguccuca

SEQ ID NO: 10034 - RNA, 38 nt, Artificial Sequence
  Description of Artificial Sequence:  Enzymatic Nucleic Acid
uccuugaacugaugaggccguuaggccgaaaaguccuc

SEQ ID NO: 10035 - RNA, 38 nt, Artificial Sequence
  Description of Artificial Sequence:  Enzymatic Nucleic Acid
uuuccuugcugaugaggccguuaggccgaaagaagucc

SEQ ID NO: 10036 - RNA, 38 nt, Artificial Sequence
  Description of Artificial Sequence:  Enzymatic Nucleic Acid
cuuuccuucugaugaggccguuaggccgaaaagaaguc

SEQ ID NO: 10037 - RNA, 38 nt, Artificial Sequence
  Description of Artificial Sequence:  Enzymatic Nucleic Acid
agcugaaacugaugaggccguuaggccgaaacuuuccu

SEQ ID NO: 10038 - RNA, 38 nt, Artificial Sequence
  Description of Artificial Sequence:  Enzymatic Nucleic Acid
ggagcugacugaugaggccguuaggccgaaauacuuuc

SEQ ID NO: 10039 - RNA, 38 nt, Artificial Sequence
  Description of Artificial Sequence:  Enzymatic Nucleic Acid
cggagcugcugaugaggccguuaggccgaaaauacuuu

SEQ ID NO: 10040 - RNA, 38 nt, Artificial Sequence
  Description of Artificial Sequence:  Enzymatic Nucleic Acid
ucggagcucugaugaggccguuaggccgaaaaauacuu

SEQ ID NO: 10041 - RNA, 38 nt, Artificial Sequence
  Description of Artificial Sequence:  Enzymatic Nucleic Acid
aaacuucgcugaugaggccguuaggccgaaagcugaaa

SEQ ID NO: 10042 - RNA, 38 nt, Artificial Sequence
  Description of Artificial Sequence:  Enzymatic Nucleic Acid
cugaauuacugaugaggccguuaggccgaaacuucgga

SEQ ID NO: 10043 - RNA, 38 nt, Artificial Sequence
  Description of Artificial Sequence:  Enzymatic Nucleic Acid
ccugaauucugaugaggccguuaggccgaaaacuucgg

SEQ ID NO: 10044 - RNA, 38 nt, Artificial Sequence
  Description of Artificial Sequence:  Enzymatic Nucleic Acid
uccugaaucugaugaggccguuaggccgaaaaacuucg

SEQ ID NO: 10045 - RNA, 38 nt, Artificial Sequence
  Description of Artificial Sequence:  Enzymatic Nucleic Acid
gcuuccugcugaugaggccguuaggccgaaauuaaacu

SEQ ID NO: 10046 - RNA, 38 nt, Artificial Sequence
  Description of Artificial Sequence:  Enzymatic Nucleic Acid
agcuuccucugaugaggccguuaggccgaaaauuaaac

SEQ ID NO: 10047 - RNA, 38 nt, Artificial Sequence
  Description of Artificial Sequence:  Enzymatic Nucleic Acid
caucaucacugaugaggccguuaggccgaaagcuuccu

SEQ ID NO: 10048 - RNA, 38 nt, Artificial Sequence
  Description of Artificial Sequence:  Enzymatic Nucleic Acid
acauaucucugaugaggccguuaggccgaaacaucauc

SEQ ID NO: 10049 - RNA, 38 nt, Artificial Sequence
  Description of Artificial Sequence:  Enzymatic Nucleic Acid
cauuuacacugaugaggccguuaggccgaaaucugaca

SEQ ID NO: 10050 - RNA, 38 nt, Artificial Sequence
  Description of Artificial Sequence:  Enzymatic Nucleic Acid
aaagcauucugaugaggccguuaggccgaaacauaucu

SEQ ID NO: 10051 - RNA, 38 nt, Artificial Sequence
  Description of Artificial Sequence:  Enzymatic Nucleic Acid
gaacuugacugaugaggccguuaggccgaaagcauuua

SEQ ID NO: 10052 - RNA, 38 nt, Artificial Sequence
  Description of Artificial Sequence:  Enzymatic Nucleic Acid
ugaacuugcugaugaggccguuaggccgaaaagcauuu

SEQ ID NO: 10053 - RNA, 38 nt, Artificial Sequence
  Description of Artificial Sequence:  Enzymatic Nucleic Acid
augaacuucugaugaggccguuaggccgaaaaagcauu

SEQ ID NO: 10054 - RNA, 38 nt, Artificial Sequence
  Description of Artificial Sequence:  Enzymatic Nucleic Acid
ggcucaugcugaugaggccguuaggccgaaacuugaaa

SEQ ID NO: 10055 - RNA, 38 nt, Artificial Sequence
  Description of Artificial Sequence:  Enzymatic Nucleic Acid
aggcucaucugaugaggccguuaggccgaaaacuugaa

SEQ ID NO: 10056 - RNA, 38 nt, Artificial Sequence
  Description of Artificial Sequence:  Enzymatic Nucleic Acid
aagguuuucugaugaggccguuaggccgaaauucuuuc

SEQ ID NO: 10057 - RNA, 38 nt, Artificial Sequence
  Description of Artificial Sequence:  Enzymatic Nucleic Acid
guucuucacugaugaggccguuaggccgaaagguuuug

SEQ ID NO: 10058 - RNA, 38 nt, Artificial Sequence
  Description of Artificial Sequence:  Enzymatic Nucleic Acid
aguucuuccugaugaggccguuaggccgaaaagguuuu

SEQ ID NO: 10059 - RNA, 38 nt, Artificial Sequence
  Description of Artificial Sequence:  Enzymatic Nucleic Acid
uucgguaacugaugaggccguuaggccgaaaguucuuc

SEQ ID NO: 10060 - RNA, 38 nt, Artificial Sequence
  Description of Artificial Sequence:  Enzymatic Nucleic Acid
auucgguacugaugaggccguuaggccgaaaaguucuu

SEQ ID NO: 10061 - RNA, 38 nt, Artificial Sequence
  Description of Artificial Sequence:  Enzymatic Nucleic Acid
cauucggucugaugaggccguuaggccgaaaaaguucu

SEQ ID NO: 10062 - RNA, 38 nt, Artificial Sequence
  Description of Artificial Sequence:  Enzymatic Nucleic Acid
gcauucggcugaugaggccguuaggccgaaaaaaguuc

SEQ ID NO: 10063 - RNA, 38 nt, Artificial Sequence
  Description of Artificial Sequence:  Enzymatic Nucleic Acid
caaacaugcugaugaggccguuaggccgaaagguggca

SEQ ID NO: 10064 - RNA, 38 nt, Artificial Sequence
  Description of Artificial Sequence:  Enzymatic Nucleic Acid
agucaucacugaugaggccguuaggccgaaacauggag

SEQ ID NO: 10065 - RNA, 38 nt, Artificial Sequence
  Description of Artificial Sequence:  Enzymatic Nucleic Acid
uagucauccugaugaggccguuaggccgaaaacaugga

SEQ ID NO: 10066 - RNA, 38 nt, Artificial Sequence
  Description of Artificial Sequence:  Enzymatic Nucleic Acid
cgcccuggcugaugaggccguuaggccgaaagucauca

SEQ ID NO: 10067 - RNA, 38 nt, Artificial Sequence
  Description of Artificial Sequence:  Enzymatic Nucleic Acid
ggccaacacugaugaggccguuaggccgaaagugcugc

SEQ ID NO: 10068 - RNA, 38 nt, Artificial Sequence
  Description of Artificial Sequence:  Enzymatic Nucleic Acid
gagaggcccugaugaggccguuaggccgaaacagagug

SEQ ID NO: 10069 - RNA, 38 nt, Artificial Sequence
  Description of Artificial Sequence:  Enzymatic Nucleic Acid
gcaugggacugaugaggccguuaggccgaaaggccaac

SEQ ID NO: 10070 - RNA, 38 nt, Artificial Sequence
  Description of Artificial Sequence:  Enzymatic Nucleic Acid
cagcauggcugaugaggccguuaggccgaaagaggcca

SEQ ID NO: 10071 - RNA, 38 nt, Artificial Sequence
  Description of Artificial Sequence:  Enzymatic Nucleic Acid
uccaggugcugaugaggccguuaggccgaaagcgcuuc

SEQ ID NO: 10072 - RNA, 38 nt, Artificial Sequence
  Description of Artificial Sequence:  Enzymatic Nucleic Acid
guccaggucugaugaggccguuaggccgaaaagcgcuu

SEQ ID NO: 10073 - RNA, 38 nt, Artificial Sequence
  Description of Artificial Sequence:  Enzymatic Nucleic Acid
ucuugagccugaugaggccguuaggccgaaaggccuug

SEQ ID NO: 10074 - RNA, 38 nt, Artificial Sequence
  Description of Artificial Sequence:  Enzymatic Nucleic Acid
ucaaucuucugaugaggccguuaggccgaaagcgaggc

SEQ ID NO: 10075 - RNA, 38 nt, Artificial Sequence
  Description of Artificial Sequence:  Enzymatic Nucleic Acid
cucaaguccugaugaggccguuaggccgaaaucuugag

SEQ ID NO: 10076 - RNA, 38 nt, Artificial Sequence
  Description of Artificial Sequence:  Enzymatic Nucleic Acid
uuacucuccugaugaggccguuaggccgaaagucaauc

SEQ ID NO: 10077 - RNA, 38 nt, Artificial Sequence
  Description of Artificial Sequence:  Enzymatic Nucleic Acid
uuacuggucugaugaggccguuaggccgaaacucucaa

SEQ ID NO: 10078 - RNA, 38 nt, Artificial Sequence
  Description of Artificial Sequence:  Enzymatic Nucleic Acid
cuuacuuucugaugaggccguuaggccgaaacugguua

SEQ ID NO: 10079 - RNA, 38 nt, Artificial Sequence
  Description of Artificial Sequence:  Enzymatic Nucleic Acid
cgacuccucugaugaggccguuaggccgaaacuuuuac

SEQ ID NO: 10080 - RNA, 38 nt, Artificial Sequence
  Description of Artificial Sequence:  Enzymatic Nucleic Acid
acagcccccugaugaggccguuaggccgaaacuccuua

SEQ ID NO: 10081 - RNA, 38 nt, Artificial Sequence
  Description of Artificial Sequence:  Enzymatic Nucleic Acid
ugacaucacugaugaggccguuaggccgaaacagcccc

SEQ ID NO: 10082 - RNA, 38 nt, Artificial Sequence
  Description of Artificial Sequence:  Enzymatic Nucleic Acid
ggccugcucugaugaggccguuaggccgaaacaucaga

SEQ ID NO: 10083 - RNA, 38 nt, Artificial Sequence
  Description of Artificial Sequence:  Enzymatic Nucleic Acid
auggcagacugaugaggccguuaggccgaaacugggcc

SEQ ID NO: 10084 - RNA, 38 nt, Artificial Sequence
  Description of Artificial Sequence:  Enzymatic Nucleic Acid
aauggcagcugaugaggccguuaggccgaaaacugggc

SEQ ID NO: 10085 - RNA, 38 nt, Artificial Sequence
  Description of Artificial Sequence:  Enzymatic Nucleic Acid
gaauggcacugaugaggccguuaggccgaaaaacuggg

SEQ ID NO: 10086 - RNA, 38 nt, Artificial Sequence
  Description of Artificial Sequence:  Enzymatic Nucleic Acid
acagcuggcugaugaggccguuaggccgaaauggcaga

SEQ ID NO: 10087 - RNA, 38 nt, Artificial Sequence
  Description of Artificial Sequence:  Enzymatic Nucleic Acid
cacagcugcugaugaggccguuaggccgaaaauggcag

SEQ ID NO: 10088 - RNA, 38 nt, Artificial Sequence
  Description of Artificial Sequence:  Enzymatic Nucleic Acid
ccuucgcucugaugaggccguuaggccgaaacgugccc

SEQ ID NO: 10089 - RNA, 38 nt, Artificial Sequence
  Description of Artificial Sequence:  Enzymatic Nucleic Acid
cguaggugcugaugaggccguuaggccgaaaccugcgc

SEQ ID NO: 10090 - RNA, 38 nt, Artificial Sequence
  Description of Artificial Sequence:  Enzymatic Nucleic Acid
ucguaggucugaugaggccguuaggccgaaaaccugcg

SEQ ID NO: 10091 - RNA, 38 nt, Artificial Sequence
  Description of Artificial Sequence:  Enzymatic Nucleic Acid
cguggucgcugaugaggccguuaggccgaaaggugaac

SEQ ID NO: 10092 - RNA, 38 nt, Artificial Sequence
  Description of Artificial Sequence:  Enzymatic Nucleic Acid
cagcacgccugaugaggccguuaggccgaaauuuuccu

SEQ ID NO: 10093 - RNA, 38 nt, Artificial Sequence
  Description of Artificial Sequence:  Enzymatic Nucleic Acid
ggggcgggcugaugaggccguuaggccgaaagcagcac

SEQ ID NO: 10094 - RNA, 38 nt, Artificial Sequence
  Description of Artificial Sequence:  Enzymatic Nucleic Acid
ccgaguugcugaugaggccguuaggccgaaagucuggg

SEQ ID NO: 10095 - RNA, 38 nt, Artificial Sequence
  Description of Artificial Sequence:  Enzymatic Nucleic Acid
ggaccacccugaugaggccguuaggccgaaaguuguag

SEQ ID NO: 10096 - RNA, 38 nt, Artificial Sequence
  Description of Artificial Sequence:  Enzymatic Nucleic Acid
gaguacagcugaugaggccguuaggccgaaaccaccga

SEQ ID NO: 10097 - RNA, 38 nt, Artificial Sequence
  Description of Artificial Sequence:  Enzymatic Nucleic Acid
ggguggagcugaugaggccguuaggccgaaacaggacc

SEQ ID NO: 10098 - RNA, 38 nt, Artificial Sequence
  Description of Artificial Sequence:  Enzymatic Nucleic Acid
guggggugcugaugaggccguuaggccgaaaguacagg

SEQ ID NO: 10099 - RNA, 38 nt, Artificial Sequence
  Description of Artificial Sequence:  Enzymatic Nucleic Acid
aaacucuacugaugaggccguuaggccgaaaugggugg

SEQ ID NO: 10100 - RNA, 38 nt, Artificial Sequence
  Description of Artificial Sequence:  Enzymatic Nucleic Acid
ucaaacuccugaugaggccguuaggccgaaagaugggu

SEQ ID NO: 10101 - RNA, 38 nt, Artificial Sequence
  Description of Artificial Sequence:  Enzymatic Nucleic Acid
ucgugucacugaugaggccguuaggccgaaacucuaga

SEQ ID NO: 10102 - RNA, 38 nt, Artificial Sequence
  Description of Artificial Sequence:  Enzymatic Nucleic Acid
uucguguccugaugaggccguuaggccgaaaacucuag

SEQ ID NO: 10103 - RNA, 38 nt, Artificial Sequence
  Description of Artificial Sequence:  Enzymatic Nucleic Acid
cuagaaaucugaugaggccguuaggccgaaaggcuucg

SEQ ID NO: 10104 - RNA, 38 nt, Artificial Sequence
  Description of Artificial Sequence:  Enzymatic Nucleic Acid
ucuagaaacugaugaggccguuaggccgaaaaggcuuc

SEQ ID NO: 10105 - RNA, 38 nt, Artificial Sequence
  Description of Artificial Sequence:  Enzymatic Nucleic Acid
cuucuagacugaugaggccguuaggccgaaauaaggcu

SEQ ID NO: 10106 - RNA, 38 nt, Artificial Sequence
  Description of Artificial Sequence:  Enzymatic Nucleic Acid
gcuucuagcugaugaggccguuaggccgaaaauaaggc

SEQ ID NO: 10107 - RNA, 38 nt, Artificial Sequence
  Description of Artificial Sequence:  Enzymatic Nucleic Acid
ugcuucuacugaugaggccguuaggccgaaaaauaagg

SEQ ID NO: 10108 - RNA, 38 nt, Artificial Sequence
  Description of Artificial Sequence:  Enzymatic Nucleic Acid
ugugcuuccugaugaggccguuaggccgaaagaaauaa

SEQ ID NO: 10109 - RNA, 38 nt, Artificial Sequence
  Description of Artificial Sequence:  Enzymatic Nucleic Acid
gguauaaacugaugaggccguuaggccgaaacacaugu

SEQ ID NO: 10110 - RNA, 38 nt, Artificial Sequence
  Description of Artificial Sequence:  Enzymatic Nucleic Acid
gggguauacugaugaggccguuaggccgaaauacacau

SEQ ID NO: 10111 - RNA, 38 nt, Artificial Sequence
  Description of Artificial Sequence:  Enzymatic Nucleic Acid
ggggguaucugaugaggccguuaggccgaaaauacaca

SEQ ID NO: 10112 - RNA, 38 nt, Artificial Sequence
  Description of Artificial Sequence:  Enzymatic Nucleic Acid
uggggguacugaugaggccguuaggccgaaaaauacac

SEQ ID NO: 10113 - RNA, 38 nt, Artificial Sequence
  Description of Artificial Sequence:  Enzymatic Nucleic Acid
ccugggggcugaugaggccguuaggccgaaauaaauac

SEQ ID NO: 10114 - RNA, 38 nt, Artificial Sequence
  Description of Artificial Sequence:  Enzymatic Nucleic Acid
gcaaaagccugaugaggccguuaggccgaaaguuuccu

SEQ ID NO: 10115 - RNA, 38 nt, Artificial Sequence
  Description of Artificial Sequence:  Enzymatic Nucleic Acid
acuggcaacugaugaggccguuaggccgaaagcuaguu

SEQ ID NO: 10116 - RNA, 38 nt, Artificial Sequence
  Description of Artificial Sequence:  Enzymatic Nucleic Acid
uacuggcacugaugaggccguuaggccgaaaagcuagu

SEQ ID NO: 10117 - RNA, 38 nt, Artificial Sequence
  Description of Artificial Sequence:  Enzymatic Nucleic Acid
auacuggccugaugaggccguuaggccgaaaaagcuag

SEQ ID NO: 10118 - RNA, 38 nt, Artificial Sequence
  Description of Artificial Sequence:  Enzymatic Nucleic Acid
augcauaacugaugaggccguuaggccgaaacuggcaa

SEQ ID NO: 10119 - RNA, 38 nt, Artificial Sequence
  Description of Artificial Sequence:  Enzymatic Nucleic Acid
auaugcaucugaugaggccguuaggccgaaauacuggc

SEQ ID NO: 10120 - RNA, 38 nt, Artificial Sequence
  Description of Artificial Sequence:  Enzymatic Nucleic Acid
uauaugcacugaugaggccguuaggccgaaaauacugg

SEQ ID NO: 10121 - RNA, 38 nt, Artificial Sequence
  Description of Artificial Sequence:  Enzymatic Nucleic Acid
aacuuauacugaugaggccguuaggccgaaaugcauaa

SEQ ID NO: 10122 - RNA, 38 nt, Artificial Sequence
  Description of Artificial Sequence:  Enzymatic Nucleic Acid
uaaacuuacugaugaggccguuaggccgaaauaugcau

SEQ ID NO: 10123 - RNA, 38 nt, Artificial Sequence
  Description of Artificial Sequence:  Enzymatic Nucleic Acid
uguaaacucugaugaggccguuaggccgaaauauaugc

SEQ ID NO: 10124 - RNA, 38 nt, Artificial Sequence
  Description of Artificial Sequence:  Enzymatic Nucleic Acid
aagguguacugaugaggccguuaggccgaaacuuauau

SEQ ID NO: 10125 - RNA, 38 nt, Artificial Sequence
  Description of Artificial Sequence:  Enzymatic Nucleic Acid
aaaggugucugaugaggccguuaggccgaaaacuuaua

SEQ ID NO: 10126 - RNA, 38 nt, Artificial Sequence
  Description of Artificial Sequence:  Enzymatic Nucleic Acid
uaaaggugcugaugaggccguuaggccgaaaaacuuau

SEQ ID NO: 10127 - RNA, 38 nt, Artificial Sequence
  Description of Artificial Sequence:  Enzymatic Nucleic Acid
gaaagauacugaugaggccguuaggccgaaagguguaa

SEQ ID NO: 10128 - RNA, 38 nt, Artificial Sequence
  Description of Artificial Sequence:  Enzymatic Nucleic Acid
ggaaagaucugaugaggccguuaggccgaaaaggugua

SEQ ID NO: 10129 - RNA, 38 nt, Artificial Sequence
  Description of Artificial Sequence:  Enzymatic Nucleic Acid
uggaaagacugaugaggccguuaggccgaaaaaggugu

SEQ ID NO: 10130 - RNA, 38 nt, Artificial Sequence
  Description of Artificial Sequence:  Enzymatic Nucleic Acid
cauggaaacugaugaggccguuaggccgaaauaaaggu

SEQ ID NO: 10131 - RNA, 38 nt, Artificial Sequence
  Description of Artificial Sequence:  Enzymatic Nucleic Acid
cccauggacugaugaggccguuaggccgaaagauaaag

SEQ ID NO: 10132 - RNA, 38 nt, Artificial Sequence
  Description of Artificial Sequence:  Enzymatic Nucleic Acid
ucccauggcugaugaggccguuaggccgaaaagauaaa

SEQ ID NO: 10133 - RNA, 38 nt, Artificial Sequence
  Description of Artificial Sequence:  Enzymatic Nucleic Acid
cucccaugcugaugaggccguuaggccgaaaaagauaa

SEQ ID NO: 10134 - RNA, 38 nt, Artificial Sequence
  Description of Artificial Sequence:  Enzymatic Nucleic Acid
aucacaaacugaugaggccguuaggccgaaagcagcug

SEQ ID NO: 10135 - RNA, 38 nt, Artificial Sequence
  Description of Artificial Sequence:  Enzymatic Nucleic Acid
aaucacaacugaugaggccguuaggccgaaaagcagcu

SEQ ID NO: 10136 - RNA, 38 nt, Artificial Sequence
  Description of Artificial Sequence:  Enzymatic Nucleic Acid
aaaucacacugaugaggccguuaggccgaaaaagcagc

SEQ ID NO: 10137 - RNA, 38 nt, Artificial Sequence
  Description of Artificial Sequence:  Enzymatic Nucleic Acid
aaaaucaccugaugaggccguuaggccgaaaaaagcag

SEQ ID NO: 10138 - RNA, 38 nt, Artificial Sequence
  Description of Artificial Sequence:  Enzymatic Nucleic Acid
auuaaaaacugaugaggccguuaggccgaaaucacaaa

SEQ ID NO: 10139 - RNA, 38 nt, Artificial Sequence
  Description of Artificial Sequence:  Enzymatic Nucleic Acid
uauuaaaacugaugaggccguuaggccgaaaaucacaa

SEQ ID NO: 10140 - RNA, 38 nt, Artificial Sequence
  Description of Artificial Sequence:  Enzymatic Nucleic Acid
cuauuaaacugaugaggccguuaggccgaaaaaucaca

SEQ ID NO: 10141 - RNA, 38 nt, Artificial Sequence
  Description of Artificial Sequence:  Enzymatic Nucleic Acid
acuauuaacugaugaggccguuaggccgaaaaaaucac

SEQ ID NO: 10142 - RNA, 38 nt, Artificial Sequence
  Description of Artificial Sequence:  Enzymatic Nucleic Acid
cacuauuacugaugaggccguuaggccgaaaaaaauca

SEQ ID NO: 10143 - RNA, 38 nt, Artificial Sequence
  Description of Artificial Sequence:  Enzymatic Nucleic Acid
gcacuauucugaugaggccguuaggccgaaaaaaaauc

SEQ ID NO: 10144 - RNA, 38 nt, Artificial Sequence
  Description of Artificial Sequence:  Enzymatic Nucleic Acid
agcacuaucugaugaggccguuaggccgaaaaaaaaau

SEQ ID NO: 10145 - RNA, 38 nt, Artificial Sequence
  Description of Artificial Sequence:  Enzymatic Nucleic Acid
aaaagcaccugaugaggccguuaggccgaaauuaaaaa

SEQ ID NO: 10146 - RNA, 38 nt, Artificial Sequence
  Description of Artificial Sequence:  Enzymatic Nucleic Acid
aaaaaaaacugaugaggccguuaggccgaaagcacuau

SEQ ID NO: 10147 - RNA, 38 nt, Artificial Sequence
  Description of Artificial Sequence:  Enzymatic Nucleic Acid
aaaaaaaacugaugaggccguuaggccgaaaagcacua

SEQ ID NO: 10148 - RNA, 38 nt, Artificial Sequence
  Description of Artificial Sequence:  Enzymatic Nucleic Acid
caaaaaaacugaugaggccguuaggccgaaaaagcacu

SEQ ID NO: 10149 - RNA, 38 nt, Artificial Sequence
  Description of Artificial Sequence:  Enzymatic Nucleic Acid
ucaaaaaacugaugaggccguuaggccgaaaaaagcac

SEQ ID NO: 10150 - RNA, 38 nt, Artificial Sequence
  Description of Artificial Sequence:  Enzymatic Nucleic Acid
gucaaaaacugaugaggccguuaggccgaaaaaaagca

SEQ ID NO: 10151 - RNA, 38 nt, Artificial Sequence
  Description of Artificial Sequence:  Enzymatic Nucleic Acid
agucaaaacugaugaggccguuaggccgaaaaaaaagc

SEQ ID NO: 10152 - RNA, 38 nt, Artificial Sequence
  Description of Artificial Sequence:  Enzymatic Nucleic Acid
uagucaaacugaugaggccguuaggccgaaaaaaaaag

SEQ ID NO: 10153 - RNA, 38 nt, Artificial Sequence
  Description of Artificial Sequence:  Enzymatic Nucleic Acid
uuagucaacugaugaggccguuaggccgaaaaaaaaaa

SEQ ID NO: 10154 - RNA, 38 nt, Artificial Sequence
  Description of Artificial Sequence:  Enzymatic Nucleic Acid
guuagucacugaugaggccguuaggccgaaaaaaaaaa

SEQ ID NO: 10155 - RNA, 38 nt, Artificial Sequence
  Description of Artificial Sequence:  Enzymatic Nucleic Acid
uguuaguccugaugaggccguuaggccgaaaaaaaaaa

SEQ ID NO: 10156 - RNA, 38 nt, Artificial Sequence
  Description of Artificial Sequence:  Enzymatic Nucleic Acid
auucuugucugaugaggccguuaggccgaaagucaaaa

SEQ ID NO: 10157 - RNA, 38 nt, Artificial Sequence
  Description of Artificial Sequence:  Enzymatic Nucleic Acid
ucuggagucugaugaggccguuaggccgaaacauucuu

SEQ ID NO: 10158 - RNA, 38 nt, Artificial Sequence
  Description of Artificial Sequence:  Enzymatic Nucleic Acid
ucuaucugcugaugaggccguuaggccgaaaguuacau

SEQ ID NO: 10159 - RNA, 38 nt, Artificial Sequence
  Description of Artificial Sequence:  Enzymatic Nucleic Acid
uauuucuccugaugaggccguuaggccgaaaucuggag

SEQ ID NO: 10160 - RNA, 38 nt, Artificial Sequence
  Description of Artificial Sequence:  Enzymatic Nucleic Acid
cuugucaccugaugaggccguuaggccgaaauuucucu

SEQ ID NO: 10161 - RNA, 38 nt, Artificial Sequence
  Description of Artificial Sequence:  Enzymatic Nucleic Acid
uuuagcagcugaugaggccguuaggccgaaaguguucu

SEQ ID NO: 10162 - RNA, 38 nt, Artificial Sequence
  Description of Artificial Sequence:  Enzymatic Nucleic Acid
ugaggauucugaugaggccguuaggccgaaagcaguag

SEQ ID NO: 10163 - RNA, 38 nt, Artificial Sequence
  Description of Artificial Sequence:  Enzymatic Nucleic Acid
aacaugagcugaugaggccguuaggccgaaauuuagca

SEQ ID NO: 10164 - RNA, 38 nt, Artificial Sequence
  Description of Artificial Sequence:  Enzymatic Nucleic Acid
aguaacaucugaugaggccguuaggccgaaaggauuua

SEQ ID NO: 10165 - RNA, 38 nt, Artificial Sequence
  Description of Artificial Sequence:  Enzymatic Nucleic Acid
cacugagucugaugaggccguuaggccgaaacaugagg

SEQ ID NO: 10166 - RNA, 38 nt, Artificial Sequence
  Description of Artificial Sequence:  Enzymatic Nucleic Acid
acacugagcugaugaggccguuaggccgaaaacaugag

SEQ ID NO: 10167 - RNA, 38 nt, Artificial Sequence
  Description of Artificial Sequence:  Enzymatic Nucleic Acid
cuaacacucugaugaggccguuaggccgaaaguaacau

SEQ ID NO: 10168 - RNA, 38 nt, Artificial Sequence
  Description of Artificial Sequence:  Enzymatic Nucleic Acid
auuucucucugaugaggccguuaggccgaaacacugag

SEQ ID NO: 10169 - RNA, 38 nt, Artificial Sequence
  Description of Artificial Sequence:  Enzymatic Nucleic Acid
gauuucuccugaugaggccguuaggccgaaaacacuga

SEQ ID NO: 10170 - RNA, 38 nt, Artificial Sequence
  Description of Artificial Sequence:  Enzymatic Nucleic Acid
uuaggaagcugaugaggccguuaggccgaaauuucucu

SEQ ID NO: 10171 - RNA, 38 nt, Artificial Sequence
  Description of Artificial Sequence:  Enzymatic Nucleic Acid
gguuuaggcugaugaggccguuaggccgaaaggauuuc

SEQ ID NO: 10172 - RNA, 38 nt, Artificial Sequence
  Description of Artificial Sequence:  Enzymatic Nucleic Acid
ggguuuagcugaugaggccguuaggccgaaaaggauuu

SEQ ID NO: 10173 - RNA, 38 nt, Artificial Sequence
  Description of Artificial Sequence:  Enzymatic Nucleic Acid
auuggguucugaugaggccguuaggccgaaaggaagga

SEQ ID NO: 10174 - RNA, 38 nt, Artificial Sequence
  Description of Artificial Sequence:  Enzymatic Nucleic Acid
gagcagggcugaugaggccguuaggccgaaagucauug

SEQ ID NO: 10175 - RNA, 38 nt, Artificial Sequence
  Description of Artificial Sequence:  Enzymatic Nucleic Acid
ggagcaggcugaugaggccguuaggccgaaaagucauu

SEQ ID NO: 10176 - RNA, 38 nt, Artificial Sequence
  Description of Artificial Sequence:  Enzymatic Nucleic Acid
ggggguugcugaugaggccguuaggccgaaagcaggga

SEQ ID NO: 10177 - RNA, 38 nt, Artificial Sequence
  Description of Artificial Sequence:  Enzymatic Nucleic Acid
cgugcccucugaugaggccguuaggccgaaagguggcg

SEQ ID NO: 10178 - RNA, 38 nt, Artificial Sequence
  Description of Artificial Sequence:  Enzymatic Nucleic Acid
cucaaucacugaugaggccguuaggccgaaacuggucc

SEQ ID NO: 10179 - RNA, 38 nt, Artificial Sequence
  Description of Artificial Sequence:  Enzymatic Nucleic Acid
ccucaauccugaugaggccguuaggccgaaaacugguc

SEQ ID NO: 10180 - RNA, 38 nt, Artificial Sequence
  Description of Artificial Sequence:  Enzymatic Nucleic Acid
agcuccuccugaugaggccguuaggccgaaaucaaacu

SEQ ID NO: 10181 - RNA, 38 nt, Artificial Sequence
  Description of Artificial Sequence:  Enzymatic Nucleic Acid
cauugggucugaugaggccguuaggccgaaaucagugc

SEQ ID NO: 10182 - RNA, 38 nt, Artificial Sequence
  Description of Artificial Sequence:  Enzymatic Nucleic Acid
ggguacgucugaugaggccguuaggccgaaaugcauug

SEQ ID NO: 10183 - RNA, 38 nt, Artificial Sequence
  Description of Artificial Sequence:  Enzymatic Nucleic Acid
caguggggcugaugaggccguuaggccgaaacgugaug

SEQ ID NO: 10184 - RNA, 38 nt, Artificial Sequence
  Description of Artificial Sequence:  Enzymatic Nucleic Acid
cuggggcucugaugaggccguuaggccgaaacgggcuu

SEQ ID NO: 10185 - RNA, 38 nt, Artificial Sequence
  Description of Artificial Sequence:  Enzymatic Nucleic Acid
ccuggggccugaugaggccguuaggccgaaaacgggcu

SEQ ID NO: 10186 - RNA, 38 nt, Artificial Sequence
  Description of Artificial Sequence:  Enzymatic Nucleic Acid
cagccagucugaugaggccguuaggccgaaauccccug

SEQ ID NO: 10187 - RNA, 38 nt, Artificial Sequence
  Description of Artificial Sequence:  Enzymatic Nucleic Acid
acucccgacugaugaggccguuaggccgaaauguugcu

SEQ ID NO: 10188 - RNA, 38 nt, Artificial Sequence
  Description of Artificial Sequence:  Enzymatic Nucleic Acid
ggacuccccugaugaggccguuaggccgaaagauguug

SEQ ID NO: 10189 - RNA, 38 nt, Artificial Sequence
  Description of Artificial Sequence:  Enzymatic Nucleic Acid
ugcuagagcugaugaggccguuaggccgaaacucccga

SEQ ID NO: 10190 - RNA, 38 nt, Artificial Sequence
  Description of Artificial Sequence:  Enzymatic Nucleic Acid
gccugcuacugaugaggccguuaggccgaaaggacucc

SEQ ID NO: 10191 - RNA, 38 nt, Artificial Sequence
  Description of Artificial Sequence:  Enzymatic Nucleic Acid
aggccugccugaugaggccguuaggccgaaagaggacu

SEQ ID NO: 10192 - RNA, 38 nt, Artificial Sequence
  Description of Artificial Sequence:  Enzymatic Nucleic Acid
acaugucucugaugaggccguuaggccgaaaggccugc

SEQ ID NO: 10193 - RNA, 38 nt, Artificial Sequence
  Description of Artificial Sequence:  Enzymatic Nucleic Acid
gcgucucacugaugaggccguuaggccgaaauucuuuc

SEQ ID NO: 10194 - RNA, 38 nt, Artificial Sequence
  Description of Artificial Sequence:  Enzymatic Nucleic Acid
ugcgucuccugaugaggccguuaggccgaaaauucuuu

SEQ ID NO: 10195 - RNA, 38 nt, Artificial Sequence
  Description of Artificial Sequence:  Enzymatic Nucleic Acid
gcauugcucugaugaggccguuaggccgaaagccccgu

SEQ ID NO: 10196 - RNA, 38 nt, Artificial Sequence
  Description of Artificial Sequence:  Enzymatic Nucleic Acid
gccacugacugaugaggccguuaggccgaaauggcauu

SEQ ID NO: 10197 - RNA, 38 nt, Artificial Sequence
  Description of Artificial Sequence:  Enzymatic Nucleic Acid
agccacugcugaugaggccguuaggccgaaaauggcau

SEQ ID NO: 10198 - RNA, 38 nt, Artificial Sequence
  Description of Artificial Sequence:  Enzymatic Nucleic Acid
aagccacucugaugaggccguuaggccgaaaaauggca

SEQ ID NO: 10199 - RNA, 38 nt, Artificial Sequence
  Description of Artificial Sequence:  Enzymatic Nucleic Acid
gagcugggcugaugaggccguuaggccgaaagccacug

SEQ ID NO: 10200 - RNA, 38 nt, Artificial Sequence
  Description of Artificial Sequence:  Enzymatic Nucleic Acid
agagcuggcugaugaggccguuaggccgaaaagccacu

SEQ ID NO: 10201 - RNA, 38 nt, Artificial Sequence
  Description of Artificial Sequence:  Enzymatic Nucleic Acid
aagggucacugaugaggccguuaggccgaaagcuggga

SEQ ID NO: 10202 - RNA, 38 nt, Artificial Sequence
  Description of Artificial Sequence:  Enzymatic Nucleic Acid
aaauguagcugaugaggccguuaggccgaaagggucag

SEQ ID NO: 10203 - RNA, 38 nt, Artificial Sequence
  Description of Artificial Sequence:  Enzymatic Nucleic Acid
caaauguacugaugaggccguuaggccgaaaaggguca

SEQ ID NO: 10204 - RNA, 38 nt, Artificial Sequence
  Description of Artificial Sequence:  Enzymatic Nucleic Acid
cucaaaugcugaugaggccguuaggccgaaagaagggu

SEQ ID NO: 10205 - RNA, 38 nt, Artificial Sequence
  Description of Artificial Sequence:  Enzymatic Nucleic Acid
ggcccucacugaugaggccguuaggccgaaauguagaa

SEQ ID NO: 10206 - RNA, 38 nt, Artificial Sequence
  Description of Artificial Sequence:  Enzymatic Nucleic Acid
gggcccuccugaugaggccguuaggccgaaaauguaga

SEQ ID NO: 10207 - RNA, 38 nt, Artificial Sequence
  Description of Artificial Sequence:  Enzymatic Nucleic Acid
auccagaacugaugaggccguuaggccgaaaugucccc

SEQ ID NO: 10208 - RNA, 38 nt, Artificial Sequence
  Description of Artificial Sequence:  Enzymatic Nucleic Acid
aauccagacugaugaggccguuaggccgaaaauguccc

SEQ ID NO: 10209 - RNA, 38 nt, Artificial Sequence
  Description of Artificial Sequence:  Enzymatic Nucleic Acid
gaauccagcugaugaggccguuaggccgaaaaaugucc

SEQ ID NO: 10210 - RNA, 38 nt, Artificial Sequence
  Description of Artificial Sequence:  Enzymatic Nucleic Acid
agaauccacugaugaggccguuaggccgaaaaaauguc

SEQ ID NO: 10211 - RNA, 38 nt, Artificial Sequence
  Description of Artificial Sequence:  Enzymatic Nucleic Acid
ccucccagcugaugaggccguuaggccgaaauccagaa

SEQ ID NO: 10212 - RNA, 38 nt, Artificial Sequence
  Description of Artificial Sequence:  Enzymatic Nucleic Acid
gccucccacugaugaggccguuaggccgaaaauccaga

SEQ ID NO: 10213 - RNA, 38 nt, Artificial Sequence
  Description of Artificial Sequence:  Enzymatic Nucleic Acid
aaaaaagacugaugaggccguuaggccgaaauuugucc

SEQ ID NO: 10214 - RNA, 38 nt, Artificial Sequence
  Description of Artificial Sequence:  Enzymatic Nucleic Acid
ccaaaaaacugaugaggccguuaggccgaaauauuugu

SEQ ID NO: 10215 - RNA, 38 nt, Artificial Sequence
  Description of Artificial Sequence:  Enzymatic Nucleic Acid
uuccaaaacugaugaggccguuaggccgaaagauauuu

SEQ ID NO: 10216 - RNA, 38 nt, Artificial Sequence
  Description of Artificial Sequence:  Enzymatic Nucleic Acid
guuccaaacugaugaggccguuaggccgaaaagauauu

SEQ ID NO: 10217 - RNA, 38 nt, Artificial Sequence
  Description of Artificial Sequence:  Enzymatic Nucleic Acid
aguuccaacugaugaggccguuaggccgaaaaagauau

SEQ ID NO: 10218 - RNA, 38 nt, Artificial Sequence
  Description of Artificial Sequence:  Enzymatic Nucleic Acid
uaguuccacugaugaggccguuaggccgaaaaaagaua

SEQ ID NO: 10219 - RNA, 38 nt, Artificial Sequence
  Description of Artificial Sequence:  Enzymatic Nucleic Acid
uuaguucccugaugaggccguuaggccgaaaaaaagau

SEQ ID NO: 10220 - RNA, 38 nt, Artificial Sequence
  Description of Artificial Sequence:  Enzymatic Nucleic Acid
auuugcuucugaugaggccguuaggccgaaaguuccaa

SEQ ID NO: 10221 - RNA, 38 nt, Artificial Sequence
  Description of Artificial Sequence:  Enzymatic Nucleic Acid
aggucuaacugaugaggccguuaggccgaaauuugcuu

SEQ ID NO: 10222 - RNA, 38 nt, Artificial Sequence
  Description of Artificial Sequence:  Enzymatic Nucleic Acid
aaggucuacugaugaggccguuaggccgaaaauuugcu

SEQ ID NO: 10223 - RNA, 38 nt, Artificial Sequence
  Description of Artificial Sequence:  Enzymatic Nucleic Acid
aaaggucucugaugaggccguuaggccgaaaaauuugc

SEQ ID NO: 10224 - RNA, 38 nt, Artificial Sequence
  Description of Artificial Sequence:  Enzymatic Nucleic Acid
uaaagguccugaugaggccguuaggccgaaaaaauuug

SEQ ID NO: 10225 - RNA, 38 nt, Artificial Sequence
  Description of Artificial Sequence:  Enzymatic Nucleic Acid
cauagguacugaugaggccguuaggccgaaaggucuaa

SEQ ID NO: 10226 - RNA, 38 nt, Artificial Sequence
  Description of Artificial Sequence:  Enzymatic Nucleic Acid
ccauaggucugaugaggccguuaggccgaaaaggucua

SEQ ID NO: 10227 - RNA, 38 nt, Artificial Sequence
  Description of Artificial Sequence:  Enzymatic Nucleic Acid
uccauaggcugaugaggccguuaggccgaaaaaggucu

SEQ ID NO: 10228 - RNA, 38 nt, Artificial Sequence
  Description of Artificial Sequence:  Enzymatic Nucleic Acid
cacuuccacugaugaggccguuaggccgaaagguaaag

SEQ ID NO: 10229 - RNA, 38 nt, Artificial Sequence
  Description of Artificial Sequence:  Enzymatic Nucleic Acid
ggacauagcugaugaggccguuaggccgaaaccacuuc

SEQ ID NO: 10230 - RNA, 38 nt, Artificial Sequence
  Description of Artificial Sequence:  Enzymatic Nucleic Acid
uggacauacugaugaggccguuaggccgaaaaccacuu

SEQ ID NO: 10231 - RNA, 38 nt, Artificial Sequence
  Description of Artificial Sequence:  Enzymatic Nucleic Acid
aauggacacugaugaggccguuaggccgaaagaaccac

SEQ ID NO: 10232 - RNA, 38 nt, Artificial Sequence
  Description of Artificial Sequence:  Enzymatic Nucleic Acid
ugagaaugcugaugaggccguuaggccgaaacauagaa

SEQ ID NO: 10233 - RNA, 38 nt, Artificial Sequence
  Description of Artificial Sequence:  Enzymatic Nucleic Acid
cgaaugagcugaugaggccguuaggccgaaauggacau

SEQ ID NO: 10234 - RNA, 38 nt, Artificial Sequence
  Description of Artificial Sequence:  Enzymatic Nucleic Acid
acgaaugacugaugaggccguuaggccgaaaauggaca

SEQ ID NO: 10235 - RNA, 38 nt, Artificial Sequence
  Description of Artificial Sequence:  Enzymatic Nucleic Acid
ccacgaaucugaugaggccguuaggccgaaagaaugga

SEQ ID NO: 10236 - RNA, 38 nt, Artificial Sequence
  Description of Artificial Sequence:  Enzymatic Nucleic Acid
augccacgcugaugaggccguuaggccgaaaugagaau

SEQ ID NO: 10237 - RNA, 38 nt, Artificial Sequence
  Description of Artificial Sequence:  Enzymatic Nucleic Acid
caugccaccugaugaggccguuaggccgaaaaugagaa

SEQ ID NO: 10238 - RNA, 38 nt, Artificial Sequence
  Description of Artificial Sequence:  Enzymatic Nucleic Acid
caaaucaacugaugaggccguuaggccgaaacaugcca

SEQ ID NO: 10239 - RNA, 38 nt, Artificial Sequence
  Description of Artificial Sequence:  Enzymatic Nucleic Acid
acaaaucacugaugaggccguuaggccgaaaacaugcc

SEQ ID NO: 10240 - RNA, 38 nt, Artificial Sequence
  Description of Artificial Sequence:  Enzymatic Nucleic Acid
uacaaauccugaugaggccguuaggccgaaaaacaugc

SEQ ID NO: 10241 - RNA, 38 nt, Artificial Sequence
  Description of Artificial Sequence:  Enzymatic Nucleic Acid
gugcuacacugaugaggccguuaggccgaaaucaaaac

SEQ ID NO: 10242 - RNA, 38 nt, Artificial Sequence
  Description of Artificial Sequence:  Enzymatic Nucleic Acid
agugcuaccugaugaggccguuaggccgaaaaucaaaa

SEQ ID NO: 10243 - RNA, 38 nt, Artificial Sequence
  Description of Artificial Sequence:  Enzymatic Nucleic Acid
cucagugccugaugaggccguuaggccgaaacaaauca

SEQ ID NO: 10244 - RNA, 38 nt, Artificial Sequence
  Description of Artificial Sequence:  Enzymatic Nucleic Acid
ucagaguucugaugaggccguuaggccgaaagugccac

SEQ ID NO: 10245 - RNA, 38 nt, Artificial Sequence
  Description of Artificial Sequence:  Enzymatic Nucleic Acid
ugggcucacugaugaggccguuaggccgaaaguugagu

SEQ ID NO: 10246 - RNA, 38 nt, Artificial Sequence
  Description of Artificial Sequence:  Enzymatic Nucleic Acid
gccaaaagcugaugaggccguuaggccgaaaugggcuc

SEQ ID NO: 10247 - RNA, 38 nt, Artificial Sequence
  Description of Artificial Sequence:  Enzymatic Nucleic Acid
ggagccaacugaugaggccguuaggccgaaaguauggg

SEQ ID NO: 10248 - RNA, 38 nt, Artificial Sequence
  Description of Artificial Sequence:  Enzymatic Nucleic Acid
aggagccacugaugaggccguuaggccgaaaaguaugg

SEQ ID NO: 10249 - RNA, 38 nt, Artificial Sequence
  Description of Artificial Sequence:  Enzymatic Nucleic Acid
gaggagcccugaugaggccguuaggccgaaaaaguaug

SEQ ID NO: 10250 - RNA, 38 nt, Artificial Sequence
  Description of Artificial Sequence:  Enzymatic Nucleic Acid
uacuagagcugaugaggccguuaggccgaaagccaaaa

SEQ ID NO: 10251 - RNA, 38 nt, Artificial Sequence
  Description of Artificial Sequence:  Enzymatic Nucleic Acid
ucuuacuacugaugaggccguuaggccgaaaggagcca

SEQ ID NO: 10252 - RNA, 38 nt, Artificial Sequence
  Description of Artificial Sequence:  Enzymatic Nucleic Acid
caucuuaccugaugaggccguuaggccgaaagaggagc

SEQ ID NO: 10253 - RNA, 38 nt, Artificial Sequence
  Description of Artificial Sequence:  Enzymatic Nucleic Acid
gugcaucucugaugaggccguuaggccgaaacuagagg

SEQ ID NO: 10254 - RNA, 38 nt, Artificial Sequence
  Description of Artificial Sequence:  Enzymatic Nucleic Acid
cucuggcucugaugaggccguuaggccgaaaguuuuca

SEQ ID NO: 10255 - RNA, 38 nt, Artificial Sequence
  Description of Artificial Sequence:  Enzymatic Nucleic Acid
acucuggccugaugaggccguuaggccgaaaaguuuuc

SEQ ID NO: 10256 - RNA, 38 nt, Artificial Sequence
  Description of Artificial Sequence:  Enzymatic Nucleic Acid
gacaaccucugaugaggccguuaggccgaaacucuggc

SEQ ID NO: 10257 - RNA, 38 nt, Artificial Sequence
  Description of Artificial Sequence:  Enzymatic Nucleic Acid
agacaacccugaugaggccguuaggccgaaaacucugg

SEQ ID NO: 10258 - RNA, 38 nt, Artificial Sequence
  Description of Artificial Sequence:  Enzymatic Nucleic Acid
cuggagaccugaugaggccguuaggccgaaaccuaacu

SEQ ID NO: 10259 - RNA, 38 nt, Artificial Sequence
  Description of Artificial Sequence:  Enzymatic Nucleic Acid
ggccuggacugaugaggccguuaggccgaaacaaccua

SEQ ID NO: 10260 - RNA, 38 nt, Artificial Sequence
  Description of Artificial Sequence:  Enzymatic Nucleic Acid
auggccugcugaugaggccguuaggccgaaagacaacc

SEQ ID NO: 10261 - RNA, 38 nt, Artificial Sequence
  Description of Artificial Sequence:  Enzymatic Nucleic Acid
uucagugucugaugaggccguuaggccgaaaggccauc

SEQ ID NO: 10262 - RNA, 38 nt, Artificial Sequence
  Description of Artificial Sequence:  Enzymatic Nucleic Acid
uuucagugcugaugaggccguuaggccgaaaaggccau

SEQ ID NO: 10263 - RNA, 38 nt, Artificial Sequence
  Description of Artificial Sequence:  Enzymatic Nucleic Acid
uagaaugucugaugaggccguuaggccgaaacauuuuc

SEQ ID NO: 10264 - RNA, 38 nt, Artificial Sequence
  Description of Artificial Sequence:  Enzymatic Nucleic Acid
caaaauagcugaugaggccguuaggccgaaaugugaca

SEQ ID NO: 10265 - RNA, 38 nt, Artificial Sequence
  Description of Artificial Sequence:  Enzymatic Nucleic Acid
ccaaaauacugaugaggccguuaggccgaaaaugugac

SEQ ID NO: 10266 - RNA, 38 nt, Artificial Sequence
  Description of Artificial Sequence:  Enzymatic Nucleic Acid
acccaaaacugaugaggccguuaggccgaaagaaugug

SEQ ID NO: 10267 - RNA, 38 nt, Artificial Sequence
  Description of Artificial Sequence:  Enzymatic Nucleic Acid
auacccaacugaugaggccguuaggccgaaauagaaug

SEQ ID NO: 10268 - RNA, 38 nt, Artificial Sequence
  Description of Artificial Sequence:  Enzymatic Nucleic Acid
aauacccacugaugaggccguuaggccgaaaauagaau

SEQ ID NO: 10269 - RNA, 38 nt, Artificial Sequence
  Description of Artificial Sequence:  Enzymatic Nucleic Acid
uaauaccccugaugaggccguuaggccgaaaaauagaa

SEQ ID NO: 10270 - RNA, 38 nt, Artificial Sequence
  Description of Artificial Sequence:  Enzymatic Nucleic Acid
uauauuaacugaugaggccguuaggccgaaacccaaaa

SEQ ID NO: 10271 - RNA, 38 nt, Artificial Sequence
  Description of Artificial Sequence:  Enzymatic Nucleic Acid
uauauauucugaugaggccguuaggccgaaauacccaa

SEQ ID NO: 10272 - RNA, 38 nt, Artificial Sequence
  Description of Artificial Sequence:  Enzymatic Nucleic Acid
cuauauaucugaugaggccguuaggccgaaaauaccca

SEQ ID NO: 10273 - RNA, 38 nt, Artificial Sequence
  Description of Artificial Sequence:  Enzymatic Nucleic Acid
ggacuauacugaugaggccguuaggccgaaauuaauac

SEQ ID NO: 10274 - RNA, 38 nt, Artificial Sequence
  Description of Artificial Sequence:  Enzymatic Nucleic Acid
cuggacuacugaugaggccguuaggccgaaauauuaau

SEQ ID NO: 10275 - RNA, 38 nt, Artificial Sequence
  Description of Artificial Sequence:  Enzymatic Nucleic Acid
gucuggaccugaugaggccguuaggccgaaauauauua

SEQ ID NO: 10276 - RNA, 38 nt, Artificial Sequence
  Description of Artificial Sequence:  Enzymatic Nucleic Acid
agugucugcugaugaggccguuaggccgaaacuauaua

SEQ ID NO: 10277 - RNA, 38 nt, Artificial Sequence
  Description of Artificial Sequence:  Enzymatic Nucleic Acid
auugaguucugaugaggccguuaggccgaaagugucug

SEQ ID NO: 10278 - RNA, 38 nt, Artificial Sequence
  Description of Artificial Sequence:  Enzymatic Nucleic Acid
aauugagucugaugaggccguuaggccgaaaagugucu

SEQ ID NO: 10279 - RNA, 38 nt, Artificial Sequence
  Description of Artificial Sequence:  Enzymatic Nucleic Acid
aagaaauucugaugaggccguuaggccgaaaguuaagu

SEQ ID NO: 10280 - RNA, 38 nt, Artificial Sequence
  Description of Artificial Sequence:  Enzymatic Nucleic Acid
uaccaagacugaugaggccguuaggccgaaauugaguu

SEQ ID NO: 10281 - RNA, 38 nt, Artificial Sequence
  Description of Artificial Sequence:  Enzymatic Nucleic Acid
auaccaagcugaugaggccguuaggccgaaaauugagu

SEQ ID NO: 10282 - RNA, 38 nt, Artificial Sequence
  Description of Artificial Sequence:  Enzymatic Nucleic Acid
aauaccaacugaugaggccguuaggccgaaaaauugag

SEQ ID NO: 10283 - RNA, 38 nt, Artificial Sequence
  Description of Artificial Sequence:  Enzymatic Nucleic Acid
auaauacccugaugaggccguuaggccgaaagaaauug

SEQ ID NO: 10284 - RNA, 38 nt, Artificial Sequence
  Description of Artificial Sequence:  Enzymatic Nucleic Acid
cagaauaacugaugaggccguuaggccgaaaccaagaa

SEQ ID NO: 10285 - RNA, 38 nt, Artificial Sequence
  Description of Artificial Sequence:  Enzymatic Nucleic Acid
aacagaaucugaugaggccguuaggccgaaauaccaag

SEQ ID NO: 10286 - RNA, 38 nt, Artificial Sequence
  Description of Artificial Sequence:  Enzymatic Nucleic Acid
aaacagaacugaugaggccguuaggccgaaaauaccaa

SEQ ID NO: 10287 - RNA, 38 nt, Artificial Sequence
  Description of Artificial Sequence:  Enzymatic Nucleic Acid
caaaacagcugaugaggccguuaggccgaaauaauacc

SEQ ID NO: 10288 - RNA, 38 nt, Artificial Sequence
  Description of Artificial Sequence:  Enzymatic Nucleic Acid
gcaaaacacugaugaggccguuaggccgaaaauaauac

SEQ ID NO: 10289 - RNA, 38 nt, Artificial Sequence
  Description of Artificial Sequence:  Enzymatic Nucleic Acid
cugugcaacugaugaggccguuaggccgaaacagaaua

SEQ ID NO: 10290 - RNA, 38 nt, Artificial Sequence
  Description of Artificial Sequence:  Enzymatic Nucleic Acid
acugugcacugaugaggccguuaggccgaaaacagaau

SEQ ID NO: 10291 - RNA, 38 nt, Artificial Sequence
  Description of Artificial Sequence:  Enzymatic Nucleic Acid
aacugugccugaugaggccguuaggccgaaaaacagaa

SEQ ID NO: 10292 - RNA, 38 nt, Artificial Sequence
  Description of Artificial Sequence:  Enzymatic Nucleic Acid
ucacaacucugaugaggccguuaggccgaaacugugca

SEQ ID NO: 10293 - RNA, 38 nt, Artificial Sequence
  Description of Artificial Sequence:  Enzymatic Nucleic Acid
uucacaaccugaugaggccguuaggccgaaaacugugc

SEQ ID NO: 10294 - RNA, 38 nt, Artificial Sequence
  Description of Artificial Sequence:  Enzymatic Nucleic Acid
ucuuucaccugaugaggccguuaggccgaaacuaacug

SEQ ID NO: 10295 - RNA, 38 nt, Artificial Sequence
  Description of Artificial Sequence:  Enzymatic Nucleic Acid
cuccucagcugaugaggccguuaggccgaaacugcauu

SEQ ID NO: 10296 - RNA, 38 nt, Artificial Sequence
  Description of Artificial Sequence:  Enzymatic Nucleic Acid
auggagaacugaugaggccguuaggccgaaacucuccu

SEQ ID NO: 10297 - RNA, 38 nt, Artificial Sequence
  Description of Artificial Sequence:  Enzymatic Nucleic Acid
uauggagacugaugaggccguuaggccgaaaacucucc

SEQ ID NO: 10298 - RNA, 38 nt, Artificial Sequence
  Description of Artificial Sequence:  Enzymatic Nucleic Acid
auauggagcugaugaggccguuaggccgaaaaacucuc

SEQ ID NO: 10299 - RNA, 38 nt, Artificial Sequence
  Description of Artificial Sequence:  Enzymatic Nucleic Acid
gauauggacugaugaggccguuaggccgaaaaaacucu

SEQ ID NO: 10300 - RNA, 38 nt, Artificial Sequence
  Description of Artificial Sequence:  Enzymatic Nucleic Acid
uugauaugcugaugaggccguuaggccgaaagaaaacu

SEQ ID NO: 10301 - RNA, 38 nt, Artificial Sequence
  Description of Artificial Sequence:  Enzymatic Nucleic Acid
cguuuugacugaugaggccguuaggccgaaauggagaa

SEQ ID NO: 10302 - RNA, 38 nt, Artificial Sequence
  Description of Artificial Sequence:  Enzymatic Nucleic Acid
cucguuuucugaugaggccguuaggccgaaauauggag

SEQ ID NO: 10303 - RNA, 38 nt, Artificial Sequence
  Description of Artificial Sequence:  Enzymatic Nucleic Acid
accuuauucugaugaggccguuaggccgaaaccuuuuu

SEQ ID NO: 10304 - RNA, 38 nt, Artificial Sequence
  Description of Artificial Sequence:  Enzymatic Nucleic Acid
cuugaccucugaugaggccguuaggccgaaauugaccu

SEQ ID NO: 10305 - RNA, 38 nt, Artificial Sequence
  Description of Artificial Sequence:  Enzymatic Nucleic Acid
cuucccuucugaugaggccguuaggccgaaaccuuauu

SEQ ID NO: 10306 - RNA, 38 nt, Artificial Sequence
  Description of Artificial Sequence:  Enzymatic Nucleic Acid
gguauagacugaugaggccguuaggccgaaacgggguc

SEQ ID NO: 10307 - RNA, 38 nt, Artificial Sequence
  Description of Artificial Sequence:  Enzymatic Nucleic Acid
uugguauacugaugaggccguuaggccgaaagacgggg

SEQ ID NO: 10308 - RNA, 38 nt, Artificial Sequence
  Description of Artificial Sequence:  Enzymatic Nucleic Acid
gguugguacugaugaggccguuaggccgaaagagacgg

SEQ ID NO: 10309 - RNA, 38 nt, Artificial Sequence
  Description of Artificial Sequence:  Enzymatic Nucleic Acid
uugguuggcugaugaggccguuaggccgaaauagagac

SEQ ID NO: 10310 - RNA, 38 nt, Artificial Sequence
  Description of Artificial Sequence:  Enzymatic Nucleic Acid
uguuggugcugaugaggccguuaggccgaaauugguuu

SEQ ID NO: 10311 - RNA, 38 nt, Artificial Sequence
  Description of Artificial Sequence:  Enzymatic Nucleic Acid
guguuggucugaugaggccguuaggccgaaaauugguu

SEQ ID NO: 10312 - RNA, 38 nt, Artificial Sequence
  Description of Artificial Sequence:  Enzymatic Nucleic Acid
uggguccccugaugaggccguuaggccgaaacuguguu

SEQ ID NO: 10313 - RNA, 38 nt, Artificial Sequence
  Description of Artificial Sequence:  Enzymatic Nucleic Acid
acgugacucugaugaggccguuaggccgaaacuuccug

SEQ ID NO: 10314 - RNA, 38 nt, Artificial Sequence
  Description of Artificial Sequence:  Enzymatic Nucleic Acid
ggaaacgucugaugaggccguuaggccgaaacugacuu

SEQ ID NO: 10315 - RNA, 38 nt, Artificial Sequence
  Description of Artificial Sequence:  Enzymatic Nucleic Acid
gaaaaggacugaugaggccguuaggccgaaacgugacu

SEQ ID NO: 10316 - RNA, 38 nt, Artificial Sequence
  Description of Artificial Sequence:  Enzymatic Nucleic Acid
ugaaaaggcugaugaggccguuaggccgaaaacgugac

SEQ ID NO: 10317 - RNA, 38 nt, Artificial Sequence
  Description of Artificial Sequence:  Enzymatic Nucleic Acid
augaaaagcugaugaggccguuaggccgaaaaacguga

SEQ ID NO: 10318 - RNA, 38 nt, Artificial Sequence
  Description of Artificial Sequence:  Enzymatic Nucleic Acid
uaaaugaacugaugaggccguuaggccgaaaggaaacg

SEQ ID NO: 10319 - RNA, 38 nt, Artificial Sequence
  Description of Artificial Sequence:  Enzymatic Nucleic Acid
uuaaaugacugaugaggccguuaggccgaaaaggaaac

SEQ ID NO: 10320 - RNA, 38 nt, Artificial Sequence
  Description of Artificial Sequence:  Enzymatic Nucleic Acid
auuaaaugcugaugaggccguuaggccgaaaaaggaaa

SEQ ID NO: 10321 - RNA, 38 nt, Artificial Sequence
  Description of Artificial Sequence:  Enzymatic Nucleic Acid
cauuaaaucugaugaggccguuaggccgaaaaaaggaa

SEQ ID NO: 10322 - RNA, 38 nt, Artificial Sequence
  Description of Artificial Sequence:  Enzymatic Nucleic Acid
ccccauuacugaugaggccguuaggccgaaaugaaaag

SEQ ID NO: 10323 - RNA, 38 nt, Artificial Sequence
  Description of Artificial Sequence:  Enzymatic Nucleic Acid
uccccauucugaugaggccguuaggccgaaaaugaaaa

SEQ ID NO: 10324 - RNA, 38 nt, Artificial Sequence
  Description of Artificial Sequence:  Enzymatic Nucleic Acid
auccccaucugaugaggccguuaggccgaaaaaugaaa

SEQ ID NO: 10325 - RNA, 38 nt, Artificial Sequence
  Description of Artificial Sequence:  Enzymatic Nucleic Acid
gauaguggcugaugaggccguuaggccgaaauccccau

SEQ ID NO: 10326 - RNA, 38 nt, Artificial Sequence
  Description of Artificial Sequence:  Enzymatic Nucleic Acid
agauagugcugaugaggccguuaggccgaaaaucccca

SEQ ID NO: 10327 - RNA, 38 nt, Artificial Sequence
  Description of Artificial Sequence:  Enzymatic Nucleic Acid
gugugagacugaugaggccguuaggccgaaaguggaau

SEQ ID NO: 10328 - RNA, 38 nt, Artificial Sequence
  Description of Artificial Sequence:  Enzymatic Nucleic Acid
uagugugacugaugaggccguuaggccgaaauagugga

SEQ ID NO: 10329 - RNA, 38 nt, Artificial Sequence
  Description of Artificial Sequence:  Enzymatic Nucleic Acid
auuagugucugaugaggccguuaggccgaaagauagug

SEQ ID NO: 10330 - RNA, 38 nt, Artificial Sequence
  Description of Artificial Sequence:  Enzymatic Nucleic Acid
uuucagaucugaugaggccguuaggccgaaagugugag

SEQ ID NO: 10331 - RNA, 38 nt, Artificial Sequence
  Description of Artificial Sequence:  Enzymatic Nucleic Acid
uccuuucacugaugaggccguuaggccgaaauuagugu

SEQ ID NO: 10332 - RNA, 38 nt, Artificial Sequence
  Description of Artificial Sequence:  Enzymatic Nucleic Acid
cgccagcucugaugaggccguuaggccgaaaugcucuu

SEQ ID NO: 10333 - RNA, 38 nt, Artificial Sequence
  Description of Artificial Sequence:  Enzymatic Nucleic Acid
gcgccagccugaugaggccguuaggccgaaaaugcucu

SEQ ID NO: 10334 - RNA, 38 nt, Artificial Sequence
  Description of Artificial Sequence:  Enzymatic Nucleic Acid
gugcuuaacugaugaggccguuaggccgaaaugcgcca

SEQ ID NO: 10335 - RNA, 38 nt, Artificial Sequence
  Description of Artificial Sequence:  Enzymatic Nucleic Acid
aagugcuucugaugaggccguuaggccgaaauaugcgc

SEQ ID NO: 10336 - RNA, 38 nt, Artificial Sequence
  Description of Artificial Sequence:  Enzymatic Nucleic Acid
aaagugcucugaugaggccguuaggccgaaaauaugcg

SEQ ID NO: 10337 - RNA, 38 nt, Artificial Sequence
  Description of Artificial Sequence:  Enzymatic Nucleic Acid
ggagcuuacugaugaggccguuaggccgaaagugcuua

SEQ ID NO: 10338 - RNA, 38 nt, Artificial Sequence
  Description of Artificial Sequence:  Enzymatic Nucleic Acid
aggagcuucugaugaggccguuaggccgaaaagugcuu

SEQ ID NO: 10339 - RNA, 38 nt, Artificial Sequence
  Description of Artificial Sequence:  Enzymatic Nucleic Acid
aaggagcucugaugaggccguuaggccgaaaaagugcu

SEQ ID NO: 10340 - RNA, 38 nt, Artificial Sequence
  Description of Artificial Sequence:  Enzymatic Nucleic Acid
uacucaagcugaugaggccguuaggccgaaagcuuaaa

SEQ ID NO: 10341 - RNA, 38 nt, Artificial Sequence
  Description of Artificial Sequence:  Enzymatic Nucleic Acid
uuuuacuccugaugaggccguuaggccgaaaggagcuu

SEQ ID NO: 10342 - RNA, 38 nt, Artificial Sequence
  Description of Artificial Sequence:  Enzymatic Nucleic Acid
caccuuuucugaugaggccguuaggccgaaacucaagg

SEQ ID NO: 10343 - RNA, 38 nt, Artificial Sequence
  Description of Artificial Sequence:  Enzymatic Nucleic Acid
aaauuacacugaugaggccguuaggccgaaaccaccuu

SEQ ID NO: 10344 - RNA, 38 nt, Artificial Sequence
  Description of Artificial Sequence:  Enzymatic Nucleic Acid
gcauaaaucugaugaggccguuaggccgaaacauacca

SEQ ID NO: 10345 - RNA, 38 nt, Artificial Sequence
  Description of Artificial Sequence:  Enzymatic Nucleic Acid
cuugcauacugaugaggccguuaggccgaaauuacaua

SEQ ID NO: 10346 - RNA, 38 nt, Artificial Sequence
  Description of Artificial Sequence:  Enzymatic Nucleic Acid
ccuugcaucugaugaggccguuaggccgaaaauuacau

SEQ ID NO: 10347 - RNA, 38 nt, Artificial Sequence
  Description of Artificial Sequence:  Enzymatic Nucleic Acid
accuugcacugaugaggccguuaggccgaaaaauuaca

SEQ ID NO: 10348 - RNA, 38 nt, Artificial Sequence
  Description of Artificial Sequence:  Enzymatic Nucleic Acid
uggagaaacugaugaggccguuaggccgaaaccuugca

SEQ ID NO: 10349 - RNA, 38 nt, Artificial Sequence
  Description of Artificial Sequence:  Enzymatic Nucleic Acid
acuggagacugaugaggccguuaggccgaaauaccuug

SEQ ID NO: 10350 - RNA, 38 nt, Artificial Sequence
  Description of Artificial Sequence:  Enzymatic Nucleic Acid
aacuggagcugaugaggccguuaggccgaaaauaccuu

SEQ ID NO: 10351 - RNA, 38 nt, Artificial Sequence
  Description of Artificial Sequence:  Enzymatic Nucleic Acid
caacuggacugaugaggccguuaggccgaaaaauaccu

SEQ ID NO: 10352 - RNA, 38 nt, Artificial Sequence
  Description of Artificial Sequence:  Enzymatic Nucleic Acid
cccaacugcugaugaggccguuaggccgaaagaaauac

SEQ ID NO: 10353 - RNA, 38 nt, Artificial Sequence
  Description of Artificial Sequence:  Enzymatic Nucleic Acid
ugaguccccugaugaggccguuaggccgaaacuggaga

SEQ ID NO: 10354 - RNA, 38 nt, Artificial Sequence
  Description of Artificial Sequence:  Enzymatic Nucleic Acid
aauauccucugaugaggccguuaggccgaaagucccaa

SEQ ID NO: 10355 - RNA, 38 nt, Artificial Sequence
  Description of Artificial Sequence:  Enzymatic Nucleic Acid
uuaacuaacugaugaggccguuaggccgaaauccugag

SEQ ID NO: 10356 - RNA, 38 nt, Artificial Sequence
  Description of Artificial Sequence:  Enzymatic Nucleic Acid
cauuaacucugaugaggccguuaggccgaaauauccug

SEQ ID NO: 10357 - RNA, 38 nt, Artificial Sequence
  Description of Artificial Sequence:  Enzymatic Nucleic Acid
ucauuaaccugaugaggccguuaggccgaaaauauccu

SEQ ID NO: 10358 - RNA, 38 nt, Artificial Sequence
  Description of Artificial Sequence:  Enzymatic Nucleic Acid
ggcucauucugaugaggccguuaggccgaaacuaauau

SEQ ID NO: 10359 - RNA, 38 nt, Artificial Sequence
  Description of Artificial Sequence:  Enzymatic Nucleic Acid
uggcucaucugaugaggccguuaggccgaaaacuaaua

SEQ ID NO: 10360 - RNA, 38 nt, Artificial Sequence
  Description of Artificial Sequence:  Enzymatic Nucleic Acid
cuucuagucugaugaggccguuaggccgaaauggcuca

SEQ ID NO: 10361 - RNA, 38 nt, Artificial Sequence
  Description of Artificial Sequence:  Enzymatic Nucleic Acid
uuuucuuccugaugaggccguuaggccgaaagugaugg

SEQ ID NO: 10362 - RNA, 38 nt, Artificial Sequence
  Description of Artificial Sequence:  Enzymatic Nucleic Acid
caguugaacugaugaggccguuaggccgaaaugggcuu

SEQ ID NO: 10363 - RNA, 38 nt, Artificial Sequence
  Description of Artificial Sequence:  Enzymatic Nucleic Acid
gcaguugacugaugaggccguuaggccgaaaaugggcu

SEQ ID NO: 10364 - RNA, 38 nt, Artificial Sequence
  Description of Artificial Sequence:  Enzymatic Nucleic Acid
agcaguugcugaugaggccguuaggccgaaaaaugggc

SEQ ID NO: 10365 - RNA, 38 nt, Artificial Sequence
  Description of Artificial Sequence:  Enzymatic Nucleic Acid
aagcaguucugaugaggccguuaggccgaaaaaauggg

SEQ ID NO: 10366 - RNA, 38 nt, Artificial Sequence
  Description of Artificial Sequence:  Enzymatic Nucleic Acid
aaguuucacugaugaggccguuaggccgaaagcaguug

SEQ ID NO: 10367 - RNA, 38 nt, Artificial Sequence
  Description of Artificial Sequence:  Enzymatic Nucleic Acid
caaguuuccugaugaggccguuaggccgaaaagcaguu

SEQ ID NO: 10368 - RNA, 38 nt, Artificial Sequence
  Description of Artificial Sequence:  Enzymatic Nucleic Acid
ccccaggccugaugaggccguuaggccgaaaguuucaa

SEQ ID NO: 10369 - RNA, 38 nt, Artificial Sequence
  Description of Artificial Sequence:  Enzymatic Nucleic Acid
caugcucacugaugaggccguuaggccgaaaccccagg

SEQ ID NO: 10370 - RNA, 38 nt, Artificial Sequence
  Description of Artificial Sequence:  Enzymatic Nucleic Acid
ugucuccccugaugaggccguuaggccgaaauucccau

SEQ ID NO: 10371 - RNA, 38 nt, Artificial Sequence
  Description of Artificial Sequence:  Enzymatic Nucleic Acid
cccuuucccugaugaggccguuaggccgaaacccuguc

SEQ ID NO: 10372 - RNA, 38 nt, Artificial Sequence
  Description of Artificial Sequence:  Enzymatic Nucleic Acid
cugaagagcugaugaggccguuaggccgaaaggcgccc

SEQ ID NO: 10373 - RNA, 38 nt, Artificial Sequence
  Description of Artificial Sequence:  Enzymatic Nucleic Acid
acccugaacugaugaggccguuaggccgaaaguaggcg

SEQ ID NO: 10374 - RNA, 38 nt, Artificial Sequence
  Description of Artificial Sequence:  Enzymatic Nucleic Acid
agacccugcugaugaggccguuaggccgaaagaguagg

SEQ ID NO: 10375 - RNA, 38 nt, Artificial Sequence
  Description of Artificial Sequence:  Enzymatic Nucleic Acid
uagacccucugaugaggccguuaggccgaaaagaguag

SEQ ID NO: 10376 - RNA, 38 nt, Artificial Sequence
  Description of Artificial Sequence:  Enzymatic Nucleic Acid
gaucuuuacugaugaggccguuaggccgaaacccugaa

SEQ ID NO: 10377 - RNA, 38 nt, Artificial Sequence
  Description of Artificial Sequence:  Enzymatic Nucleic Acid
uugaucuucugaugaggccguuaggccgaaagacccug

SEQ ID NO: 10378 - RNA, 38 nt, Artificial Sequence
  Description of Artificial Sequence:  Enzymatic Nucleic Acid
gcccacuucugaugaggccguuaggccgaaaucuuuag

SEQ ID NO: 10379 - RNA, 38 nt, Artificial Sequence
  Description of Artificial Sequence:  Enzymatic Nucleic Acid
agcgaucccugaugaggccguuaggccgaaaggcccac

SEQ ID NO: 10380 - RNA, 38 nt, Artificial Sequence
  Description of Artificial Sequence:  Enzymatic Nucleic Acid
agcuuagccugaugaggccguuaggccgaaauccaagg

SEQ ID NO: 10381 - RNA, 38 nt, Artificial Sequence
  Description of Artificial Sequence:  Enzymatic Nucleic Acid
agccagcucugaugaggccguuaggccgaaagcgaucc

SEQ ID NO: 10382 - RNA, 38 nt, Artificial Sequence
  Description of Artificial Sequence:  Enzymatic Nucleic Acid
aucaaacacugaugaggccguuaggccgaaagccagcu

SEQ ID NO: 10383 - RNA, 38 nt, Artificial Sequence
  Description of Artificial Sequence:  Enzymatic Nucleic Acid
uagcaucacugaugaggccguuaggccgaaacagagcc

SEQ ID NO: 10384 - RNA, 38 nt, Artificial Sequence
  Description of Artificial Sequence:  Enzymatic Nucleic Acid
auagcauccugaugaggccguuaggccgaaaacagagc

SEQ ID NO: 10385 - RNA, 38 nt, Artificial Sequence
  Description of Artificial Sequence:  Enzymatic Nucleic Acid
ugcauaaacugaugaggccguuaggccgaaagcaucaa

SEQ ID NO: 10386 - RNA, 38 nt, Artificial Sequence
  Description of Artificial Sequence:  Enzymatic Nucleic Acid
cuugcauacugaugaggccguuaggccgaaauagcauc

SEQ ID NO: 10387 - RNA, 38 nt, Artificial Sequence
  Description of Artificial Sequence:  Enzymatic Nucleic Acid
acuugcaucugaugaggccguuaggccgaaaauagcau

SEQ ID NO: 10388 - RNA, 38 nt, Artificial Sequence
  Description of Artificial Sequence:  Enzymatic Nucleic Acid
aacuugcacugaugaggccguuaggccgaaaaauagca

SEQ ID NO: 10389 - RNA, 38 nt, Artificial Sequence
  Description of Artificial Sequence:  Enzymatic Nucleic Acid
uagacccucugaugaggccguuaggccgaaacuugcau

SEQ ID NO: 10390 - RNA, 38 nt, Artificial Sequence
  Description of Artificial Sequence:  Enzymatic Nucleic Acid
auagaccccugaugaggccguuaggccgaaaacuugca

SEQ ID NO: 10391 - RNA, 38 nt, Artificial Sequence
  Description of Artificial Sequence:  Enzymatic Nucleic Acid
aauacauacugaugaggccguuaggccgaaacccuaac

SEQ ID NO: 10392 - RNA, 38 nt, Artificial Sequence
  Description of Artificial Sequence:  Enzymatic Nucleic Acid
uaaauacacugaugaggccguuaggccgaaagacccua

SEQ ID NO: 10393 - RNA, 38 nt, Artificial Sequence
  Description of Artificial Sequence:  Enzymatic Nucleic Acid
auccuaaacugaugaggccguuaggccgaaacauagac

SEQ ID NO: 10394 - RNA, 38 nt, Artificial Sequence
  Description of Artificial Sequence:  Enzymatic Nucleic Acid
gcauccuacugaugaggccguuaggccgaaauacauag

SEQ ID NO: 10395 - RNA, 38 nt, Artificial Sequence
  Description of Artificial Sequence:  Enzymatic Nucleic Acid
cgcauccucugaugaggccguuaggccgaaaauacaua

SEQ ID NO: 10396 - RNA, 38 nt, Artificial Sequence
  Description of Artificial Sequence:  Enzymatic Nucleic Acid
gcgcaucccugaugaggccguuaggccgaaaaauacau

SEQ ID NO: 10397 - RNA, 38 nt, Artificial Sequence
  Description of Artificial Sequence:  Enzymatic Nucleic Acid
cugaagagcugaugaggccguuaggccgaaaggcgcau

SEQ ID NO: 10398 - RNA, 38 nt, Artificial Sequence
  Description of Artificial Sequence:  Enzymatic Nucleic Acid
acauccuacugaugaggccguuaggccgaaauacauag

SEQ ID NO: 10399 - RNA, 38 nt, Artificial Sequence
  Description of Artificial Sequence:  Enzymatic Nucleic Acid
gacauccucugaugaggccguuaggccgaaaauacaua

SEQ ID NO: 10400 - RNA, 38 nt, Artificial Sequence
  Description of Artificial Sequence:  Enzymatic Nucleic Acid
agacaucccugaugaggccguuaggccgaaaaauacau

SEQ ID NO: 10401 - RNA, 38 nt, Artificial Sequence
  Description of Artificial Sequence:  Enzymatic Nucleic Acid
aaggugcacugaugaggccguuaggccgaaacauccua

SEQ ID NO: 10402 - RNA, 38 nt, Artificial Sequence
  Description of Artificial Sequence:  Enzymatic Nucleic Acid
ggcugcagcugaugaggccguuaggccgaaaggugcag

SEQ ID NO: 10403 - RNA, 38 nt, Artificial Sequence
  Description of Artificial Sequence:  Enzymatic Nucleic Acid
uggcugcacugaugaggccguuaggccgaaaaggugca

SEQ ID NO: 10404 - RNA, 38 nt, Artificial Sequence
  Description of Artificial Sequence:  Enzymatic Nucleic Acid
cagcuucucugaugaggccguuaggccgaaacuggcug

SEQ ID NO: 10405 - RNA, 38 nt, Artificial Sequence
  Description of Artificial Sequence:  Enzymatic Nucleic Acid
gaagcagccugaugaggccguuaggccgaaauccacug

SEQ ID NO: 10406 - RNA, 38 nt, Artificial Sequence
  Description of Artificial Sequence:  Enzymatic Nucleic Acid
uccccaagcugaugaggccguuaggccgaaagcagcaa

SEQ ID NO: 10407 - RNA, 38 nt, Artificial Sequence
  Description of Artificial Sequence:  Enzymatic Nucleic Acid
cuccccaacugaugaggccguuaggccgaaaagcagca

SEQ ID NO: 10408 - RNA, 38 nt, Artificial Sequence
  Description of Artificial Sequence:  Enzymatic Nucleic Acid
uucucccccugaugaggccguuaggccgaaagaagcag

SEQ ID NO: 10409 - RNA, 38 nt, Artificial Sequence
  Description of Artificial Sequence:  Enzymatic Nucleic Acid
aggaagcacugaugaggccguuaggccgaaacucuucu

SEQ ID NO: 10410 - RNA, 38 nt, Artificial Sequence
  Description of Artificial Sequence:  Enzymatic Nucleic Acid
auaaaaggcugaugaggccguuaggccgaaagcauacu

SEQ ID NO: 10411 - RNA, 38 nt, Artificial Sequence
  Description of Artificial Sequence:  Enzymatic Nucleic Acid
gauaaaagcugaugaggccguuaggccgaaaagcauac

SEQ ID NO: 10412 - RNA, 38 nt, Artificial Sequence
  Description of Artificial Sequence:  Enzymatic Nucleic Acid
auggauaacugaugaggccguuaggccgaaaggaagca

SEQ ID NO: 10413 - RNA, 38 nt, Artificial Sequence
  Description of Artificial Sequence:  Enzymatic Nucleic Acid
cauggauacugaugaggccguuaggccgaaaaggaagc

SEQ ID NO: 10414 - RNA, 38 nt, Artificial Sequence
  Description of Artificial Sequence:  Enzymatic Nucleic Acid
acauggaucugaugaggccguuaggccgaaaaaggaag

SEQ ID NO: 10415 - RNA, 38 nt, Artificial Sequence
  Description of Artificial Sequence:  Enzymatic Nucleic Acid
uacauggacugaugaggccguuaggccgaaaaaaggaa

SEQ ID NO: 10416 - RNA, 38 nt, Artificial Sequence
  Description of Artificial Sequence:  Enzymatic Nucleic Acid
auuacaugcugaugaggccguuaggccgaaauaaaagg

SEQ ID NO: 10417 - RNA, 38 nt, Artificial Sequence
  Description of Artificial Sequence:  Enzymatic Nucleic Acid
aguuaaaucugaugaggccguuaggccgaaacauggau

SEQ ID NO: 10418 - RNA, 38 nt, Artificial Sequence
  Description of Artificial Sequence:  Enzymatic Nucleic Acid
uacaguuacugaugaggccguuaggccgaaauuacaug

SEQ ID NO: 10419 - RNA, 38 nt, Artificial Sequence
  Description of Artificial Sequence:  Enzymatic Nucleic Acid
cuacaguucugaugaggccguuaggccgaaaauuacau

SEQ ID NO: 10420 - RNA, 38 nt, Artificial Sequence
  Description of Artificial Sequence:  Enzymatic Nucleic Acid
ucuacagucugaugaggccguuaggccgaaaaauuaca

SEQ ID NO: 10421 - RNA, 38 nt, Artificial Sequence
  Description of Artificial Sequence:  Enzymatic Nucleic Acid
ucagguuccugaugaggccguuaggccgaaacaguuaa

SEQ ID NO: 10422 - RNA, 38 nt, Artificial Sequence
  Description of Artificial Sequence:  Enzymatic Nucleic Acid
guuacuuacugaugaggccguuaggccgaaagcucagg

SEQ ID NO: 10423 - RNA, 38 nt, Artificial Sequence
  Description of Artificial Sequence:  Enzymatic Nucleic Acid
cgguuacucugaugaggccguuaggccgaaagagcuca

SEQ ID NO: 10424 - RNA, 38 nt, Artificial Sequence
  Description of Artificial Sequence:  Enzymatic Nucleic Acid
ucuucggucugaugaggccguuaggccgaaacuuagag

SEQ ID NO: 10425 - RNA, 38 nt, Artificial Sequence
  Description of Artificial Sequence:  Enzymatic Nucleic Acid
cagaggcacugaugaggccguuaggccgaaacauucuu

SEQ ID NO: 10426 - RNA, 38 nt, Artificial Sequence
  Description of Artificial Sequence:  Enzymatic Nucleic Acid
uaagaacacugaugaggccguuaggccgaaaggcauac

SEQ ID NO: 10427 - RNA, 38 nt, Artificial Sequence
  Description of Artificial Sequence:  Enzymatic Nucleic Acid
cacauaagcugaugaggccguuaggccgaaacagaggc

SEQ ID NO: 10428 - RNA, 38 nt, Artificial Sequence
  Description of Artificial Sequence:  Enzymatic Nucleic Acid
gcacauaacugaugaggccguuaggccgaaaacagagg

SEQ ID NO: 10429 - RNA, 38 nt, Artificial Sequence
  Description of Artificial Sequence:  Enzymatic Nucleic Acid
uggcacaucugaugaggccguuaggccgaaagaacaga

SEQ ID NO: 10430 - RNA, 38 nt, Artificial Sequence
  Description of Artificial Sequence:  Enzymatic Nucleic Acid
guggcacacugaugaggccguuaggccgaaaagaacag

SEQ ID NO: 10431 - RNA, 38 nt, Artificial Sequence
  Description of Artificial Sequence:  Enzymatic Nucleic Acid
uaaacaagcugaugaggccguuaggccgaaauguggca

SEQ ID NO: 10432 - RNA, 38 nt, Artificial Sequence
  Description of Artificial Sequence:  Enzymatic Nucleic Acid
cuuuaaaccugaugaggccguuaggccgaaaggaugug

SEQ ID NO: 10433 - RNA, 38 nt, Artificial Sequence
  Description of Artificial Sequence:  Enzymatic Nucleic Acid
agccuuuacugaugaggccguuaggccgaaacaaggau

SEQ ID NO: 10434 - RNA, 38 nt, Artificial Sequence
  Description of Artificial Sequence:  Enzymatic Nucleic Acid
gagccuuucugaugaggccguuaggccgaaaacaagga

SEQ ID NO: 10435 - RNA, 38 nt, Artificial Sequence
  Description of Artificial Sequence:  Enzymatic Nucleic Acid
agagccuucugaugaggccguuaggccgaaaaacaagg

SEQ ID NO: 10436 - RNA, 38 nt, Artificial Sequence
  Description of Artificial Sequence:  Enzymatic Nucleic Acid
cauacagacugaugaggccguuaggccgaaagccuuua

SEQ ID NO: 10437 - RNA, 38 nt, Artificial Sequence
  Description of Artificial Sequence:  Enzymatic Nucleic Acid
uucauacacugaugaggccguuaggccgaaagagccuu

SEQ ID NO: 10438 - RNA, 38 nt, Artificial Sequence
  Description of Artificial Sequence:  Enzymatic Nucleic Acid
ucucuucacugaugaggccguuaggccgaaacagagag

SEQ ID NO: 10439 - RNA, 38 nt, Artificial Sequence
  Description of Artificial Sequence:  Enzymatic Nucleic Acid
gugcugaucugaugaggccguuaggccgaaacgguccc

SEQ ID NO: 10440 - RNA, 38 nt, Artificial Sequence
  Description of Artificial Sequence:  Enzymatic Nucleic Acid
aaugugcucugaugaggccguuaggccgaaaugacggu

SEQ ID NO: 10441 - RNA, 38 nt, Artificial Sequence
  Description of Artificial Sequence:  Enzymatic Nucleic Acid
cacuagggcugaugaggccguuaggccgaaaugugcug

SEQ ID NO: 10442 - RNA, 38 nt, Artificial Sequence
  Description of Artificial Sequence:  Enzymatic Nucleic Acid
ucacuaggcugaugaggccguuaggccgaaaaugugcu

SEQ ID NO: 10443 - RNA, 38 nt, Artificial Sequence
  Description of Artificial Sequence:  Enzymatic Nucleic Acid
aggcucaccugaugaggccguuaggccgaaagggaaug

SEQ ID NO: 10444 - RNA, 38 nt, Artificial Sequence
  Description of Artificial Sequence:  Enzymatic Nucleic Acid
ggagccagcugaugaggccguuaggccgaaaggcucac

SEQ ID NO: 10445 - RNA, 38 nt, Artificial Sequence
  Description of Artificial Sequence:  Enzymatic Nucleic Acid
gcugccagcugaugaggccguuaggccgaaagccagua

SEQ ID NO: 10446 - RNA, 38 nt, Artificial Sequence
  Description of Artificial Sequence:  Enzymatic Nucleic Acid
uuccacaacugaugaggccguuaggccgaaagccgcug

SEQ ID NO: 10447 - RNA, 38 nt, Artificial Sequence
  Description of Artificial Sequence:  Enzymatic Nucleic Acid
cuuccacacugaugaggccguuaggccgaaaagccgcu

SEQ ID NO: 10448 - RNA, 38 nt, Artificial Sequence
  Description of Artificial Sequence:  Enzymatic Nucleic Acid
ucuuccaccugaugaggccguuaggccgaaaaagccgc

SEQ ID NO: 10449 - RNA, 38 nt, Artificial Sequence
  Description of Artificial Sequence:  Enzymatic Nucleic Acid
uggcuagucugaugaggccguuaggccgaaagucuucc

SEQ ID NO: 10450 - RNA, 38 nt, Artificial Sequence
  Description of Artificial Sequence:  Enzymatic Nucleic Acid
cuucuggccugaugaggccguuaggccgaaagugaguc

SEQ ID NO: 10451 - RNA, 38 nt, Artificial Sequence
  Description of Artificial Sequence:  Enzymatic Nucleic Acid
guggagagcugaugaggccguuaggccgaaacuguccc

SEQ ID NO: 10452 - RNA, 38 nt, Artificial Sequence
  Description of Artificial Sequence:  Enzymatic Nucleic Acid
uugguggacugaugaggccguuaggccgaaaggacugu

SEQ ID NO: 10453 - RNA, 38 nt, Artificial Sequence
  Description of Artificial Sequence:  Enzymatic Nucleic Acid
ucuuggugcugaugaggccguuaggccgaaagaggacu

SEQ ID NO: 10454 - RNA, 38 nt, Artificial Sequence
  Description of Artificial Sequence:  Enzymatic Nucleic Acid
uggauuuacugaugaggccguuaggccgaaaucuuggu

SEQ ID NO: 10455 - RNA, 38 nt, Artificial Sequence
  Description of Artificial Sequence:  Enzymatic Nucleic Acid
uuuggauucugaugaggccguuaggccgaaagaucuug

SEQ ID NO: 10456 - RNA, 38 nt, Artificial Sequence
  Description of Artificial Sequence:  Enzymatic Nucleic Acid
uuuguuugcugaugaggccguuaggccgaaauuuagau

SEQ ID NO: 10457 - RNA, 38 nt, Artificial Sequence
  Description of Artificial Sequence:  Enzymatic Nucleic Acid
ucuggcuccugaugaggccguuaggccgaaagccugcu

SEQ ID NO: 10458 - RNA, 38 nt, Artificial Sequence
  Description of Artificial Sequence:  Enzymatic Nucleic Acid
acaacaaacugaugaggccguuaggccgaaauuugucc

SEQ ID NO: 10459 - RNA, 38 nt, Artificial Sequence
  Description of Artificial Sequence:  Enzymatic Nucleic Acid
gaacaacacugaugaggccguuaggccgaaagauuugu

SEQ ID NO: 10460 - RNA, 38 nt, Artificial Sequence
  Description of Artificial Sequence:  Enzymatic Nucleic Acid
ggaacaaccugaugaggccguuaggccgaaaagauuug

SEQ ID NO: 10461 - RNA, 38 nt, Artificial Sequence
  Description of Artificial Sequence:  Enzymatic Nucleic Acid
agaggaaccugaugaggccguuaggccgaaacaaagau

SEQ ID NO: 10462 - RNA, 38 nt, Artificial Sequence
  Description of Artificial Sequence:  Enzymatic Nucleic Acid
agaagaggcugaugaggccguuaggccgaaacaacaaa

SEQ ID NO: 10463 - RNA, 38 nt, Artificial Sequence
  Description of Artificial Sequence:  Enzymatic Nucleic Acid
aagaagagcugaugaggccguuaggccgaaaacaacaa

SEQ ID NO: 10464 - RNA, 38 nt, Artificial Sequence
  Description of Artificial Sequence:  Enzymatic Nucleic Acid
guaaagaacugaugaggccguuaggccgaaaggaacaa

SEQ ID NO: 10465 - RNA, 38 nt, Artificial Sequence
  Description of Artificial Sequence:  Enzymatic Nucleic Acid
guguaaagcugaugaggccguuaggccgaaagaggaac

SEQ ID NO: 10466 - RNA, 38 nt, Artificial Sequence
  Description of Artificial Sequence:  Enzymatic Nucleic Acid
uguguaaacugaugaggccguuaggccgaaaagaggaa

SEQ ID NO: 10467 - RNA, 38 nt, Artificial Sequence
  Description of Artificial Sequence:  Enzymatic Nucleic Acid
uauguguacugaugaggccguuaggccgaaagaagagg

SEQ ID NO: 10468 - RNA, 38 nt, Artificial Sequence
  Description of Artificial Sequence:  Enzymatic Nucleic Acid
guaugugucugaugaggccguuaggccgaaaagaagag

SEQ ID NO: 10469 - RNA, 38 nt, Artificial Sequence
  Description of Artificial Sequence:  Enzymatic Nucleic Acid
cguaugugcugaugaggccguuaggccgaaaaagaaga

SEQ ID NO: 10470 - RNA, 38 nt, Artificial Sequence
  Description of Artificial Sequence:  Enzymatic Nucleic Acid
gguuugcgcugaugaggccguuaggccgaaauguguaa

SEQ ID NO: 10471 - RNA, 38 nt, Artificial Sequence
  Description of Artificial Sequence:  Enzymatic Nucleic Acid
auuuauaacugaugaggccguuaggccgaaauugccag

SEQ ID NO: 10472 - RNA, 38 nt, Artificial Sequence
  Description of Artificial Sequence:  Enzymatic Nucleic Acid
gauuuauacugaugaggccguuaggccgaaaauugcca

SEQ ID NO: 10473 - RNA, 38 nt, Artificial Sequence
  Description of Artificial Sequence:  Enzymatic Nucleic Acid
ugauuuaucugaugaggccguuaggccgaaaaauugcc

SEQ ID NO: 10474 - RNA, 38 nt, Artificial Sequence
  Description of Artificial Sequence:  Enzymatic Nucleic Acid
cugauuuacugaugaggccguuaggccgaaaaaauugc

SEQ ID NO: 10475 - RNA, 38 nt, Artificial Sequence
  Description of Artificial Sequence:  Enzymatic Nucleic Acid
accugauucugaugaggccguuaggccgaaauaaaauu

SEQ ID NO: 10476 - RNA, 38 nt, Artificial Sequence
  Description of Artificial Sequence:  Enzymatic Nucleic Acid
aguuaccucugaugaggccguuaggccgaaauuuauaa

SEQ ID NO: 10477 - RNA, 38 nt, Artificial Sequence
  Description of Artificial Sequence:  Enzymatic Nucleic Acid
cuuccagucugaugaggccguuaggccgaaaccugauu

SEQ ID NO: 10478 - RNA, 38 nt, Artificial Sequence
  Description of Artificial Sequence:  Enzymatic Nucleic Acid
cugaguuucugaugaggccguuaggccgaaaccuccuu

SEQ ID NO: 10479 - RNA, 38 nt, Artificial Sequence
  Description of Artificial Sequence:  Enzymatic Nucleic Acid
ucugaguucugaugaggccguuaggccgaaaaccuccu

SEQ ID NO: 10480 - RNA, 38 nt, Artificial Sequence
  Description of Artificial Sequence:  Enzymatic Nucleic Acid
uuuuuucucugaugaggccguuaggccgaaaguuuaac

SEQ ID NO: 10481 - RNA, 38 nt, Artificial Sequence
  Description of Artificial Sequence:  Enzymatic Nucleic Acid
aauugacucugaugaggccguuaggccgaaaggucuuc

SEQ ID NO: 10482 - RNA, 38 nt, Artificial Sequence
  Description of Artificial Sequence:  Enzymatic Nucleic Acid
agagaauucugaugaggccguuaggccgaaacugaggu

SEQ ID NO: 10483 - RNA, 38 nt, Artificial Sequence
  Description of Artificial Sequence:  Enzymatic Nucleic Acid
aaguagagcugaugaggccguuaggccgaaauugacug

SEQ ID NO: 10484 - RNA, 38 nt, Artificial Sequence
  Description of Artificial Sequence:  Enzymatic Nucleic Acid
aaaguagacugaugaggccguuaggccgaaaauugacu

SEQ ID NO: 10485 - RNA, 38 nt, Artificial Sequence
  Description of Artificial Sequence:  Enzymatic Nucleic Acid
aaaaaguacugaugaggccguuaggccgaaagaauuga

SEQ ID NO: 10486 - RNA, 38 nt, Artificial Sequence
  Description of Artificial Sequence:  Enzymatic Nucleic Acid
aaaaaaagcugaugaggccguuaggccgaaagagaauu

SEQ ID NO: 10487 - RNA, 38 nt, Artificial Sequence
  Description of Artificial Sequence:  Enzymatic Nucleic Acid
aaaaaaaacugaugaggccguuaggccgaaaguagaga

SEQ ID NO: 10488 - RNA, 38 nt, Artificial Sequence
  Description of Artificial Sequence:  Enzymatic Nucleic Acid
aaaaaaaacugaugaggccguuaggccgaaaaguagag

SEQ ID NO: 10489 - RNA, 38 nt, Artificial Sequence
  Description of Artificial Sequence:  Enzymatic Nucleic Acid
aaaaaaaacugaugaggccguuaggccgaaaaaguaga

SEQ ID NO: 10490 - RNA, 38 nt, Artificial Sequence
  Description of Artificial Sequence:  Enzymatic Nucleic Acid
aaaaaaaacugaugaggccguuaggccgaaaaaaguag

SEQ ID NO: 10491 - RNA, 38 nt, Artificial Sequence
  Description of Artificial Sequence:  Enzymatic Nucleic Acid
aaaaaaaacugaugaggccguuaggccgaaaaaaagua

SEQ ID NO: 10492 - RNA, 38 nt, Artificial Sequence
  Description of Artificial Sequence:  Enzymatic Nucleic Acid
aaaaaaaacugaugaggccguuaggccgaaaaaaaagu

SEQ ID NO: 10493 - RNA, 38 nt, Artificial Sequence
  Description of Artificial Sequence:  Enzymatic Nucleic Acid
aaaaaaaacugaugaggccguuaggccgaaaaaaaaag

SEQ ID NO: 10494 - RNA, 38 nt, Artificial Sequence
  Description of Artificial Sequence:  Enzymatic Nucleic Acid
gaaaaaaacugaugaggccguuaggccgaaaaaaaaaa

SEQ ID NO: 10495 - RNA, 38 nt, Artificial Sequence
  Description of Artificial Sequence:  Enzymatic Nucleic Acid
ggaaaaaacugaugaggccguuaggccgaaaaaaaaaa

SEQ ID NO: 10496 - RNA, 38 nt, Artificial Sequence
  Description of Artificial Sequence:  Enzymatic Nucleic Acid
uggaaaaacugaugaggccguuaggccgaaaaaaaaaa

SEQ ID NO: 10497 - RNA, 38 nt, Artificial Sequence
  Description of Artificial Sequence:  Enzymatic Nucleic Acid
uuggaaaacugaugaggccguuaggccgaaaaaaaaaa

SEQ ID NO: 10498 - RNA, 38 nt, Artificial Sequence
  Description of Artificial Sequence:  Enzymatic Nucleic Acid
uuuggaaacugaugaggccguuaggccgaaaaaaaaaa

SEQ ID NO: 10499 - RNA, 38 nt, Artificial Sequence
  Description of Artificial Sequence:  Enzymatic Nucleic Acid
auuuggaacugaugaggccguuaggccgaaaaaaaaaa

SEQ ID NO: 10500 - RNA, 38 nt, Artificial Sequence
  Description of Artificial Sequence:  Enzymatic Nucleic Acid
gauuuggacugaugaggccguuaggccgaaaaaaaaaa

SEQ ID NO: 10501 - RNA, 38 nt, Artificial Sequence
  Description of Artificial Sequence:  Enzymatic Nucleic Acid
ugauuuggcugaugaggccguuaggccgaaaaaaaaaa

SEQ ID NO: 10502 - RNA, 38 nt, Artificial Sequence
  Description of Artificial Sequence:  Enzymatic Nucleic Acid
cugauuugcugaugaggccguuaggccgaaaaaaaaaa

SEQ ID NO: 10503 - RNA, 38 nt, Artificial Sequence
  Description of Artificial Sequence:  Enzymatic Nucleic Acid
uauuaucucugaugaggccguuaggccgaaauuuggaa

SEQ ID NO: 10504 - RNA, 38 nt, Artificial Sequence
  Description of Artificial Sequence:  Enzymatic Nucleic Acid
ugggcuaucugaugaggccguuaggccgaaaucugauu

SEQ ID NO: 10505 - RNA, 38 nt, Artificial Sequence
  Description of Artificial Sequence:  Enzymatic Nucleic Acid
ugcugggccugaugaggccguuaggccgaaauuaucug

SEQ ID NO: 10506 - RNA, 38 nt, Artificial Sequence
  Description of Artificial Sequence:  Enzymatic Nucleic Acid
guuaucaccugaugaggccguuaggccgaaauuugcug

SEQ ID NO: 10507 - RNA, 38 nt, Artificial Sequence
  Description of Artificial Sequence:  Enzymatic Nucleic Acid
uuauuugucugaugaggccguuaggccgaaaucacuau

SEQ ID NO: 10508 - RNA, 38 nt, Artificial Sequence
  Description of Artificial Sequence:  Enzymatic Nucleic Acid
uaagguuucugaugaggccguuaggccgaaauuuguua

SEQ ID NO: 10509 - RNA, 38 nt, Artificial Sequence
  Description of Artificial Sequence:  Enzymatic Nucleic Acid
gaacagcucugaugaggccguuaggccgaaagguuuua

SEQ ID NO: 10510 - RNA, 38 nt, Artificial Sequence
  Description of Artificial Sequence:  Enzymatic Nucleic Acid
ugaacagccugaugaggccguuaggccgaaaagguuuu

SEQ ID NO: 10511 - RNA, 38 nt, Artificial Sequence
  Description of Artificial Sequence:  Enzymatic Nucleic Acid
aagacaugcugaugaggccguuaggccgaaacagcuaa

SEQ ID NO: 10512 - RNA, 38 nt, Artificial Sequence
  Description of Artificial Sequence:  Enzymatic Nucleic Acid
caagacaucugaugaggccguuaggccgaaaacagcua

SEQ ID NO: 10513 - RNA, 38 nt, Artificial Sequence
  Description of Artificial Sequence:  Enzymatic Nucleic Acid
gaaaucaacugaugaggccguuaggccgaaacaugaac

SEQ ID NO: 10514 - RNA, 38 nt, Artificial Sequence
  Description of Artificial Sequence:  Enzymatic Nucleic Acid
uugaaauccugaugaggccguuaggccgaaagacauga

SEQ ID NO: 10515 - RNA, 38 nt, Artificial Sequence
  Description of Artificial Sequence:  Enzymatic Nucleic Acid
auuauugacugaugaggccguuaggccgaaaucaagac

SEQ ID NO: 10516 - RNA, 38 nt, Artificial Sequence
  Description of Artificial Sequence:  Enzymatic Nucleic Acid
aauuauugcugaugaggccguuaggccgaaaaucaaga

SEQ ID NO: 10517 - RNA, 38 nt, Artificial Sequence
  Description of Artificial Sequence:  Enzymatic Nucleic Acid
uaauuauucugaugaggccguuaggccgaaaaaucaag

SEQ ID NO: 10518 - RNA, 38 nt, Artificial Sequence
  Description of Artificial Sequence:  Enzymatic Nucleic Acid
gaauuaaucugaugaggccguuaggccgaaauugaaau

SEQ ID NO: 10519 - RNA, 38 nt, Artificial Sequence
  Description of Artificial Sequence:  Enzymatic Nucleic Acid
uaagaauucugaugaggccguuaggccgaaauuauuga

SEQ ID NO: 10520 - RNA, 38 nt, Artificial Sequence
  Description of Artificial Sequence:  Enzymatic Nucleic Acid
uuaagaaucugaugaggccguuaggccgaaaauuauug

SEQ ID NO: 10521 - RNA, 38 nt, Artificial Sequence
  Description of Artificial Sequence:  Enzymatic Nucleic Acid
ugauuaagcugaugaggccguuaggccgaaauuaauua

SEQ ID NO: 10522 - RNA, 38 nt, Artificial Sequence
  Description of Artificial Sequence:  Enzymatic Nucleic Acid
augauuaacugaugaggccguuaggccgaaaauuaauu

SEQ ID NO: 10523 - RNA, 38 nt, Artificial Sequence
  Description of Artificial Sequence:  Enzymatic Nucleic Acid
uaaugauucugaugaggccguuaggccgaaagaauuaa

SEQ ID NO: 10524 - RNA, 38 nt, Artificial Sequence
  Description of Artificial Sequence:  Enzymatic Nucleic Acid
uuaaugaucugaugaggccguuaggccgaaaagaauua

SEQ ID NO: 10525 - RNA, 38 nt, Artificial Sequence
  Description of Artificial Sequence:  Enzymatic Nucleic Acid
cucuuaaucugaugaggccguuaggccgaaauuaagaa

SEQ ID NO: 10526 - RNA, 38 nt, Artificial Sequence
  Description of Artificial Sequence:  Enzymatic Nucleic Acid
ggucucuucugaugaggccguuaggccgaaaugauuaa

SEQ ID NO: 10527 - RNA, 38 nt, Artificial Sequence
  Description of Artificial Sequence:  Enzymatic Nucleic Acid
uggucucucugaugaggccguuaggccgaaaaugauua

SEQ ID NO: 10528 - RNA, 38 nt, Artificial Sequence
  Description of Artificial Sequence:  Enzymatic Nucleic Acid
guauuuaucugaugaggccguuaggccgaaauggucuc

SEQ ID NO: 10529 - RNA, 38 nt, Artificial Sequence
  Description of Artificial Sequence:  Enzymatic Nucleic Acid
ggaguauucugaugaggccguuaggccgaaauuauggu

SEQ ID NO: 10530 - RNA, 38 nt, Artificial Sequence
  Description of Artificial Sequence:  Enzymatic Nucleic Acid
aaaaggagcugaugaggccguuaggccgaaauuuauua

SEQ ID NO: 10531 - RNA, 38 nt, Artificial Sequence
  Description of Artificial Sequence:  Enzymatic Nucleic Acid
uugaaaagcugaugaggccguuaggccgaaaguauuua

SEQ ID NO: 10532 - RNA, 38 nt, Artificial Sequence
  Description of Artificial Sequence:  Enzymatic Nucleic Acid
cucuugaacugaugaggccguuaggccgaaaggaguau

SEQ ID NO: 10533 - RNA, 38 nt, Artificial Sequence
  Description of Artificial Sequence:  Enzymatic Nucleic Acid
ucucuugacugaugaggccguuaggccgaaaaggagua

SEQ ID NO: 10534 - RNA, 38 nt, Artificial Sequence
  Description of Artificial Sequence:  Enzymatic Nucleic Acid
uucucuugcugaugaggccguuaggccgaaaaaggagu

SEQ ID NO: 10535 - RNA, 38 nt, Artificial Sequence
  Description of Artificial Sequence:  Enzymatic Nucleic Acid
uuucucuucugaugaggccguuaggccgaaaaaaggag

SEQ ID NO: 10536 - RNA, 38 nt, Artificial Sequence
  Description of Artificial Sequence:  Enzymatic Nucleic Acid
acaauucucugaugaggccguuaggccgaaaugguuuu

SEQ ID NO: 10537 - RNA, 38 nt, Artificial Sequence
  Description of Artificial Sequence:  Enzymatic Nucleic Acid
aacaauuccugaugaggccguuaggccgaaaaugguuu

SEQ ID NO: 10538 - RNA, 38 nt, Artificial Sequence
  Description of Artificial Sequence:  Enzymatic Nucleic Acid
ugaguaaccugaugaggccguuaggccgaaauucuaau

SEQ ID NO: 10539 - RNA, 38 nt, Artificial Sequence
  Description of Artificial Sequence:  Enzymatic Nucleic Acid
agcugagucugaugaggccguuaggccgaaacaauucu

SEQ ID NO: 10540 - RNA, 38 nt, Artificial Sequence
  Description of Artificial Sequence:  Enzymatic Nucleic Acid
gagcugagcugaugaggccguuaggccgaaaacaauuc

SEQ ID NO: 10541 - RNA, 38 nt, Artificial Sequence
  Description of Artificial Sequence:  Enzymatic Nucleic Acid
aaggagcucugaugaggccguuaggccgaaaguaacaa

SEQ ID NO: 10542 - RNA, 38 nt, Artificial Sequence
  Description of Artificial Sequence:  Enzymatic Nucleic Acid
guuugaagcugaugaggccguuaggccgaaagcugagu

SEQ ID NO: 10543 - RNA, 38 nt, Artificial Sequence
  Description of Artificial Sequence:  Enzymatic Nucleic Acid
ugaguuugcugaugaggccguuaggccgaaaggagcug

SEQ ID NO: 10544 - RNA, 38 nt, Artificial Sequence
  Description of Artificial Sequence:  Enzymatic Nucleic Acid
cugaguuucugaugaggccguuaggccgaaaaggagcu

SEQ ID NO: 10545 - RNA, 38 nt, Artificial Sequence
  Description of Artificial Sequence:  Enzymatic Nucleic Acid
acaaaccucugaugaggccguuaggccgaaaguuugaa

SEQ ID NO: 10546 - RNA, 38 nt, Artificial Sequence
  Description of Artificial Sequence:  Enzymatic Nucleic Acid
augcuacacugaugaggccguuaggccgaaaccugagu

SEQ ID NO: 10547 - RNA, 38 nt, Artificial Sequence
  Description of Artificial Sequence:  Enzymatic Nucleic Acid
uaugcuaccugaugaggccguuaggccgaaaaccugag

SEQ ID NO: 10548 - RNA, 38 nt, Artificial Sequence
  Description of Artificial Sequence:  Enzymatic Nucleic Acid
auguaugccugaugaggccguuaggccgaaacaaaccu

SEQ ID NO: 10549 - RNA, 38 nt, Artificial Sequence
  Description of Artificial Sequence:  Enzymatic Nucleic Acid
gacucaugcugaugaggccguuaggccgaaaugcuaca

SEQ ID NO: 10550 - RNA, 38 nt, Artificial Sequence
  Description of Artificial Sequence:  Enzymatic Nucleic Acid
gauggaugcugaugaggccguuaggccgaaacucaugu

SEQ ID NO: 10551 - RNA, 38 nt, Artificial Sequence
  Description of Artificial Sequence:  Enzymatic Nucleic Acid
gacugaugcugaugaggccguuaggccgaaauggacuc

SEQ ID NO: 10552 - RNA, 38 nt, Artificial Sequence
  Description of Artificial Sequence:  Enzymatic Nucleic Acid
cuuugacucugaugaggccguuaggccgaaauggaugg

SEQ ID NO: 10553 - RNA, 38 nt, Artificial Sequence
  Description of Artificial Sequence:  Enzymatic Nucleic Acid
cauucuuucugaugaggccguuaggccgaaacugaugg

SEQ ID NO: 10554 - RNA, 38 nt, Artificial Sequence
  Description of Artificial Sequence:  Enzymatic Nucleic Acid
ccagauggcugaugaggccguuaggccgaaaccauucu

SEQ ID NO: 10555 - RNA, 38 nt, Artificial Sequence
  Description of Artificial Sequence:  Enzymatic Nucleic Acid
uccagaugcugaugaggccguuaggccgaaaaccauuc

SEQ ID NO: 10556 - RNA, 38 nt, Artificial Sequence
  Description of Artificial Sequence:  Enzymatic Nucleic Acid
agacuccacugaugaggccguuaggccgaaauggaacc

SEQ ID NO: 10557 - RNA, 38 nt, Artificial Sequence
  Description of Artificial Sequence:  Enzymatic Nucleic Acid
uacauuaacugaugaggccguuaggccgaaacuccaga

SEQ ID NO: 10558 - RNA, 38 nt, Artificial Sequence
  Description of Artificial Sequence:  Enzymatic Nucleic Acid
ucuacauucugaugaggccguuaggccgaaagacucca

SEQ ID NO: 10559 - RNA, 38 nt, Artificial Sequence
  Description of Artificial Sequence:  Enzymatic Nucleic Acid
uucuacaucugaugaggccguuaggccgaaaagacucc

SEQ ID NO: 10560 - RNA, 38 nt, Artificial Sequence
  Description of Artificial Sequence:  Enzymatic Nucleic Acid
uuucuuuccugaugaggccguuaggccgaaacauuaag

SEQ ID NO: 10561 - RNA, 38 nt, Artificial Sequence
  Description of Artificial Sequence:  Enzymatic Nucleic Acid
auuauuaccugaugaggccguuaggccgaaagucucca

SEQ ID NO: 10562 - RNA, 38 nt, Artificial Sequence
  Description of Artificial Sequence:  Enzymatic Nucleic Acid
cucauuaucugaugaggccguuaggccgaaacaagucu

SEQ ID NO: 10563 - RNA, 38 nt, Artificial Sequence
  Description of Artificial Sequence:  Enzymatic Nucleic Acid
uagcucaucugaugaggccguuaggccgaaauuacaag

SEQ ID NO: 10564 - RNA, 38 nt, Artificial Sequence
  Description of Artificial Sequence:  Enzymatic Nucleic Acid
uuuguaaccugaugaggccguuaggccgaaagcucauu

SEQ ID NO: 10565 - RNA, 38 nt, Artificial Sequence
  Description of Artificial Sequence:  Enzymatic Nucleic Acid
cacuuugucugaugaggccguuaggccgaaacuagcuc

SEQ ID NO: 10566 - RNA, 38 nt, Artificial Sequence
  Description of Artificial Sequence:  Enzymatic Nucleic Acid
gcacuuugcugaugaggccguuaggccgaaaacuagcu

SEQ ID NO: 10567 - RNA, 38 nt, Artificial Sequence
  Description of Artificial Sequence:  Enzymatic Nucleic Acid
uaaugaaccugaugaggccguuaggccgaaagcacuuu

SEQ ID NO: 10568 - RNA, 38 nt, Artificial Sequence
  Description of Artificial Sequence:  Enzymatic Nucleic Acid
uuuuaaugcugaugaggccguuaggccgaaacaagcac

SEQ ID NO: 10569 - RNA, 38 nt, Artificial Sequence
  Description of Artificial Sequence:  Enzymatic Nucleic Acid
auuuuaaucugaugaggccguuaggccgaaaacaagca

SEQ ID NO: 10570 - RNA, 38 nt, Artificial Sequence
  Description of Artificial Sequence:  Enzymatic Nucleic Acid
gcuauuuucugaugaggccguuaggccgaaaugaacaa

SEQ ID NO: 10571 - RNA, 38 nt, Artificial Sequence
  Description of Artificial Sequence:  Enzymatic Nucleic Acid
ugcuauuucugaugaggccguuaggccgaaaaugaaca

SEQ ID NO: 10572 - RNA, 38 nt, Artificial Sequence
  Description of Artificial Sequence:  Enzymatic Nucleic Acid
uucagugccugaugaggccguuaggccgaaauuuuaau

SEQ ID NO: 10573 - RNA, 38 nt, Artificial Sequence
  Description of Artificial Sequence:  Enzymatic Nucleic Acid
cauguuuccugaugaggccguuaggccgaaauuuucag

SEQ ID NO: 10574 - RNA, 38 nt, Artificial Sequence
  Description of Artificial Sequence:  Enzymatic Nucleic Acid
uaucaguucugaugaggccguuaggccgaaauucaugu

SEQ ID NO: 10575 - RNA, 38 nt, Artificial Sequence
  Description of Artificial Sequence:  Enzymatic Nucleic Acid
uuaucagucugaugaggccguuaggccgaaaauucaug

SEQ ID NO: 10576 - RNA, 38 nt, Artificial Sequence
  Description of Artificial Sequence:  Enzymatic Nucleic Acid
uggaauaucugaugaggccguuaggccgaaaucaguua

SEQ ID NO: 10577 - RNA, 38 nt, Artificial Sequence
  Description of Artificial Sequence:  Enzymatic Nucleic Acid
gauuggaacugaugaggccguuaggccgaaauuaucag

SEQ ID NO: 10578 - RNA, 38 nt, Artificial Sequence
  Description of Artificial Sequence:  Enzymatic Nucleic Acid
augauuggcugaugaggccguuaggccgaaauauuauc

SEQ ID NO: 10579 - RNA, 38 nt, Artificial Sequence
  Description of Artificial Sequence:  Enzymatic Nucleic Acid
aaugauugcugaugaggccguuaggccgaaaauauuau

SEQ ID NO: 10580 - RNA, 38 nt, Artificial Sequence
  Description of Artificial Sequence:  Enzymatic Nucleic Acid
uggcaaaucugaugaggccguuaggccgaaauuggaau

SEQ ID NO: 10581 - RNA, 38 nt, Artificial Sequence
  Description of Artificial Sequence:  Enzymatic Nucleic Acid
aaauggcacugaugaggccguuaggccgaaaugauugg

SEQ ID NO: 10582 - RNA, 38 nt, Artificial Sequence
  Description of Artificial Sequence:  Enzymatic Nucleic Acid
uaaauggccugaugaggccguuaggccgaaaaugauug

SEQ ID NO: 10583 - RNA, 38 nt, Artificial Sequence
  Description of Artificial Sequence:  Enzymatic Nucleic Acid
uugucauacugaugaggccguuaggccgaaauggcaaa

SEQ ID NO: 10584 - RNA, 38 nt, Artificial Sequence
  Description of Artificial Sequence:  Enzymatic Nucleic Acid
uuugucaucugaugaggccguuaggccgaaaauggcaa

SEQ ID NO: 10585 - RNA, 38 nt, Artificial Sequence
  Description of Artificial Sequence:  Enzymatic Nucleic Acid
uuuugucacugaugaggccguuaggccgaaaaauggca

SEQ ID NO: 10586 - RNA, 38 nt, Artificial Sequence
  Description of Artificial Sequence:  Enzymatic Nucleic Acid
uuagugcccugaugaggccguuaggccgaaaccauuuu

SEQ ID NO: 10587 - RNA, 38 nt, Artificial Sequence
  Description of Artificial Sequence:  Enzymatic Nucleic Acid
uucuuugucugaugaggccguuaggccgaaagugccaa

SEQ ID NO: 10588 - RNA, 38 nt, Artificial Sequence
  Description of Artificial Sequence:  Enzymatic Nucleic Acid
cugaaaggcugaugaggccguuaggccgaaagugcucg

SEQ ID NO: 10589 - RNA, 38 nt, Artificial Sequence
  Description of Artificial Sequence:  Enzymatic Nucleic Acid
ucugaaagcugaugaggccguuaggccgaaaagugcuc

SEQ ID NO: 10590 - RNA, 38 nt, Artificial Sequence
  Description of Artificial Sequence:  Enzymatic Nucleic Acid
aacucugacugaugaggccguuaggccgaaaggaagug

SEQ ID NO: 10591 - RNA, 38 nt, Artificial Sequence
  Description of Artificial Sequence:  Enzymatic Nucleic Acid
aaacucugcugaugaggccguuaggccgaaaaggaagu

SEQ ID NO: 10592 - RNA, 38 nt, Artificial Sequence
  Description of Artificial Sequence:  Enzymatic Nucleic Acid
gaaacucucugaugaggccguuaggccgaaaaaggaag

SEQ ID NO: 10593 - RNA, 38 nt, Artificial Sequence
  Description of Artificial Sequence:  Enzymatic Nucleic Acid
aucucagacugaugaggccguuaggccgaaacucugaa

SEQ ID NO: 10594 - RNA, 38 nt, Artificial Sequence
  Description of Artificial Sequence:  Enzymatic Nucleic Acid
uaucucagcugaugaggccguuaggccgaaaacucuga

SEQ ID NO: 10595 - RNA, 38 nt, Artificial Sequence
  Description of Artificial Sequence:  Enzymatic Nucleic Acid
uuaucucacugaugaggccguuaggccgaaaaacucug

SEQ ID NO: 10596 - RNA, 38 nt, Artificial Sequence
  Description of Artificial Sequence:  Enzymatic Nucleic Acid
acguacaucugaugaggccguuaggccgaaaucucaga

SEQ ID NO: 10597 - RNA, 38 nt, Artificial Sequence
  Description of Artificial Sequence:  Enzymatic Nucleic Acid
guuccacgcugaugaggccguuaggccgaaacauuauc

SEQ ID NO: 10598 - RNA, 38 nt, Artificial Sequence
  Description of Artificial Sequence:  Enzymatic Nucleic Acid
uccacccacugaugaggccguuaggccgaaacuguucc

SEQ ID NO: 10599 - RNA, 38 nt, Artificial Sequence
  Description of Artificial Sequence:  Enzymatic Nucleic Acid
aagacacacugaugaggccguuaggccgaaacuugcac

SEQ ID NO: 10600 - RNA, 38 nt, Artificial Sequence
  Description of Artificial Sequence:  Enzymatic Nucleic Acid
acugacaacugaugaggccguuaggccgaaacacagac

SEQ ID NO: 10601 - RNA, 38 nt, Artificial Sequence
  Description of Artificial Sequence:  Enzymatic Nucleic Acid
ggacugaccugaugaggccguuaggccgaaagacacag

SEQ ID NO: 10602 - RNA, 38 nt, Artificial Sequence
  Description of Artificial Sequence:  Enzymatic Nucleic Acid
cuuggacucugaugaggccguuaggccgaaacaagaca

SEQ ID NO: 10603 - RNA, 38 nt, Artificial Sequence
  Description of Artificial Sequence:  Enzymatic Nucleic Acid
acuucuugcugaugaggccguuaggccgaaacugacaa

SEQ ID NO: 10604 - RNA, 38 nt, Artificial Sequence
  Description of Artificial Sequence:  Enzymatic Nucleic Acid
cuaaaauucugaugaggccguuaggccgaaacaucucg

SEQ ID NO: 10605 - RNA, 38 nt, Artificial Sequence
  Description of Artificial Sequence:  Enzymatic Nucleic Acid
ccuaaaaucugaugaggccguuaggccgaaaacaucuc

SEQ ID NO: 10606 - RNA, 38 nt, Artificial Sequence
  Description of Artificial Sequence:  Enzymatic Nucleic Acid
gucccuaacugaugaggccguuaggccgaaauuaacau

SEQ ID NO: 10607 - RNA, 38 nt, Artificial Sequence
  Description of Artificial Sequence:  Enzymatic Nucleic Acid
ggucccuacugaugaggccguuaggccgaaaauuaaca

SEQ ID NO: 10608 - RNA, 38 nt, Artificial Sequence
  Description of Artificial Sequence:  Enzymatic Nucleic Acid
gggucccucugaugaggccguuaggccgaaaaauuaac

SEQ ID NO: 10609 - RNA, 38 nt, Artificial Sequence
  Description of Artificial Sequence:  Enzymatic Nucleic Acid
cggguccccugaugaggccguuaggccgaaaaaauuaa

SEQ ID NO: 10610 - RNA, 38 nt, Artificial Sequence
  Description of Artificial Sequence:  Enzymatic Nucleic Acid
uaggaaaccugaugaggccguuaggccgaaaggcacgg

SEQ ID NO: 10611 - RNA, 38 nt, Artificial Sequence
  Description of Artificial Sequence:  Enzymatic Nucleic Acid
ggcuaggacugaugaggccguuaggccgaaacaaggca

SEQ ID NO: 10612 - RNA, 38 nt, Artificial Sequence
  Description of Artificial Sequence:  Enzymatic Nucleic Acid
gggcuaggcugaugaggccguuaggccgaaaacaaggc

SEQ ID NO: 10613 - RNA, 38 nt, Artificial Sequence
  Description of Artificial Sequence:  Enzymatic Nucleic Acid
ugggcuagcugaugaggccguuaggccgaaaaacaagg

SEQ ID NO: 10614 - RNA, 38 nt, Artificial Sequence
  Description of Artificial Sequence:  Enzymatic Nucleic Acid
uugugggccugaugaggccguuaggccgaaaggaaaca

SEQ ID NO: 10615 - RNA, 38 nt, Artificial Sequence
  Description of Artificial Sequence:  Enzymatic Nucleic Acid
aucuguuucugaugaggccguuaggccgaaauguuugc

SEQ ID NO: 10616 - RNA, 38 nt, Artificial Sequence
  Description of Artificial Sequence:  Enzymatic Nucleic Acid
cuagcgagcugaugaggccguuaggccgaaaucuguuu

SEQ ID NO: 10617 - RNA, 38 nt, Artificial Sequence
  Description of Artificial Sequence:  Enzymatic Nucleic Acid
aggcuagccugaugaggccguuaggccgaaaguaucug

SEQ ID NO: 10618 - RNA, 38 nt, Artificial Sequence
  Description of Artificial Sequence:  Enzymatic Nucleic Acid
aaugaggccugaugaggccguuaggccgaaagcgagua

SEQ ID NO: 10619 - RNA, 38 nt, Artificial Sequence
  Description of Artificial Sequence:  Enzymatic Nucleic Acid
auuuaaaucugaugaggccguuaggccgaaaggcuagc

SEQ ID NO: 10620 - RNA, 38 nt, Artificial Sequence
  Description of Artificial Sequence:  Enzymatic Nucleic Acid
ucaauuuacugaugaggccguuaggccgaaaugaggcu

SEQ ID NO: 10621 - RNA, 38 nt, Artificial Sequence
  Description of Artificial Sequence:  Enzymatic Nucleic Acid
aucaauuucugaugaggccguuaggccgaaaaugaggc

SEQ ID NO: 10622 - RNA, 38 nt, Artificial Sequence
  Description of Artificial Sequence:  Enzymatic Nucleic Acid
aaucaauucugaugaggccguuaggccgaaaaaugagg

SEQ ID NO: 10623 - RNA, 38 nt, Artificial Sequence
  Description of Artificial Sequence:  Enzymatic Nucleic Acid
cuuuaauccugaugaggccguuaggccgaaauuuaaau

SEQ ID NO: 10624 - RNA, 38 nt, Artificial Sequence
  Description of Artificial Sequence:  Enzymatic Nucleic Acid
ccuccuuucugaugaggccguuaggccgaaaucaauuu

SEQ ID NO: 10625 - RNA, 38 nt, Artificial Sequence
  Description of Artificial Sequence:  Enzymatic Nucleic Acid
uccuccuucugaugaggccguuaggccgaaaaucaauu

SEQ ID NO: 10626 - RNA, 38 nt, Artificial Sequence
  Description of Artificial Sequence:  Enzymatic Nucleic Acid
cggccaaacugaugaggccguuaggccgaaaugcacuc

SEQ ID NO: 10627 - RNA, 38 nt, Artificial Sequence
  Description of Artificial Sequence:  Enzymatic Nucleic Acid
gucggccacugaugaggccguuaggccgaaagaugcac

SEQ ID NO: 10628 - RNA, 38 nt, Artificial Sequence
  Description of Artificial Sequence:  Enzymatic Nucleic Acid
ugucggcccugaugaggccguuaggccgaaaagaugca

SEQ ID NO: 10629 - RNA, 38 nt, Artificial Sequence
  Description of Artificial Sequence:  Enzymatic Nucleic Acid
cacacagucugaugaggccguuaggccgaaacaccacu

SEQ ID NO: 10630 - RNA, 38 nt, Artificial Sequence
  Description of Artificial Sequence:  Enzymatic Nucleic Acid
aacacacacugaugaggccguuaggccgaaacacccac

SEQ ID NO: 10631 - RNA, 38 nt, Artificial Sequence
  Description of Artificial Sequence:  Enzymatic Nucleic Acid
augcacaacugaugaggccguuaggccgaaacacacau

SEQ ID NO: 10632 - RNA, 38 nt, Artificial Sequence
  Description of Artificial Sequence:  Enzymatic Nucleic Acid
uaugcacacugaugaggccguuaggccgaaaacacaca

SEQ ID NO: 10633 - RNA, 38 nt, Artificial Sequence
  Description of Artificial Sequence:  Enzymatic Nucleic Acid
uuaugcaccugaugaggccguuaggccgaaaaacacac

SEQ ID NO: 10634 - RNA, 38 nt, Artificial Sequence
  Description of Artificial Sequence:  Enzymatic Nucleic Acid
uaaauagucugaugaggccguuaggccgaaaugcacaa

SEQ ID NO: 10635 - RNA, 38 nt, Artificial Sequence
  Description of Artificial Sequence:  Enzymatic Nucleic Acid
uccuuaaacugaugaggccguuaggccgaaaguuaugc

SEQ ID NO: 10636 - RNA, 38 nt, Artificial Sequence
  Description of Artificial Sequence:  Enzymatic Nucleic Acid
uuuccuuacugaugaggccguuaggccgaaauaguuau

SEQ ID NO: 10637 - RNA, 38 nt, Artificial Sequence
  Description of Artificial Sequence:  Enzymatic Nucleic Acid
guuuccuucugaugaggccguuaggccgaaaauaguua

SEQ ID NO: 10638 - RNA, 38 nt, Artificial Sequence
  Description of Artificial Sequence:  Enzymatic Nucleic Acid
aguuuccucugaugaggccguuaggccgaaaaauaguu

SEQ ID NO: 10639 - RNA, 38 nt, Artificial Sequence
  Description of Artificial Sequence:  Enzymatic Nucleic Acid
aacuuuaacugaugaggccguuaggccgaaauuccagu

SEQ ID NO: 10640 - RNA, 38 nt, Artificial Sequence
  Description of Artificial Sequence:  Enzymatic Nucleic Acid
uaacuuuacugaugaggccguuaggccgaaaauuccag

SEQ ID NO: 10641 - RNA, 38 nt, Artificial Sequence
  Description of Artificial Sequence:  Enzymatic Nucleic Acid
guaacuuucugaugaggccguuaggccgaaaaauucca

SEQ ID NO: 10642 - RNA, 38 nt, Artificial Sequence
  Description of Artificial Sequence:  Enzymatic Nucleic Acid
aguaacuucugaugaggccguuaggccgaaaaaauucc

SEQ ID NO: 10643 - RNA, 38 nt, Artificial Sequence
  Description of Artificial Sequence:  Enzymatic Nucleic Acid
auaaaagucugaugaggccguuaggccgaaacuuuaaa

SEQ ID NO: 10644 - RNA, 38 nt, Artificial Sequence
  Description of Artificial Sequence:  Enzymatic Nucleic Acid
uauaaaagcugaugaggccguuaggccgaaaacuuuaa

SEQ ID NO: 10645 - RNA, 38 nt, Artificial Sequence
  Description of Artificial Sequence:  Enzymatic Nucleic Acid
uuguauaacugaugaggccguuaggccgaaaguaacuu

SEQ ID NO: 10646 - RNA, 38 nt, Artificial Sequence
  Description of Artificial Sequence:  Enzymatic Nucleic Acid
uuuguauacugaugaggccguuaggccgaaaaguaacu

SEQ ID NO: 10647 - RNA, 38 nt, Artificial Sequence
  Description of Artificial Sequence:  Enzymatic Nucleic Acid
guuuguaucugaugaggccguuaggccgaaaaaguaac

SEQ ID NO: 10648 - RNA, 38 nt, Artificial Sequence
  Description of Artificial Sequence:  Enzymatic Nucleic Acid
gguuuguacugaugaggccguuaggccgaaaaaaguaa

SEQ ID NO: 10649 - RNA, 38 nt, Artificial Sequence
  Description of Artificial Sequence:  Enzymatic Nucleic Acid
uugguuugcugaugaggccguuaggccgaaauaaaagu

SEQ ID NO: 10650 - RNA, 38 nt, Artificial Sequence
  Description of Artificial Sequence:  Enzymatic Nucleic Acid
guagcauacugaugaggccguuaggccgaaauucuugg

SEQ ID NO: 10651 - RNA, 38 nt, Artificial Sequence
  Description of Artificial Sequence:  Enzymatic Nucleic Acid
cuguagcacugaugaggccguuaggccgaaauauucuu

SEQ ID NO: 10652 - RNA, 38 nt, Artificial Sequence
  Description of Artificial Sequence:  Enzymatic Nucleic Acid
uauaucugcugaugaggccguuaggccgaaagcauaua

SEQ ID NO: 10653 - RNA, 38 nt, Artificial Sequence
  Description of Artificial Sequence:  Enzymatic Nucleic Acid
cugucuuacugaugaggccguuaggccgaaaucuguag

SEQ ID NO: 10654 - RNA, 38 nt, Artificial Sequence
  Description of Artificial Sequence:  Enzymatic Nucleic Acid
gucugucucugaugaggccguuaggccgaaauaucugu

SEQ ID NO: 10655 - RNA, 38 nt, Artificial Sequence
  Description of Artificial Sequence:  Enzymatic Nucleic Acid
uaggaccacugaugaggccguuaggccgaaaccauguc

SEQ ID NO: 10656 - RNA, 38 nt, Artificial Sequence
  Description of Artificial Sequence:  Enzymatic Nucleic Acid
auaggacccugaugaggccguuaggccgaaaaccaugu

SEQ ID NO: 10657 - RNA, 38 nt, Artificial Sequence
  Description of Artificial Sequence:  Enzymatic Nucleic Acid
aaauauagcugaugaggccguuaggccgaaaccaaacc

SEQ ID NO: 10658 - RNA, 38 nt, Artificial Sequence
  Description of Artificial Sequence:  Enzymatic Nucleic Acid
uagaaauacugaugaggccguuaggccgaaaggaccaa

SEQ ID NO: 10659 - RNA, 38 nt, Artificial Sequence
  Description of Artificial Sequence:  Enzymatic Nucleic Acid
acuagaaacugaugaggccguuaggccgaaauaggacc

SEQ ID NO: 10660 - RNA, 38 nt, Artificial Sequence
  Description of Artificial Sequence:  Enzymatic Nucleic Acid
ugacuagacugaugaggccguuaggccgaaauauagga

SEQ ID NO: 10661 - RNA, 38 nt, Artificial Sequence
  Description of Artificial Sequence:  Enzymatic Nucleic Acid
augacuagcugaugaggccguuaggccgaaaauauagg

SEQ ID NO: 10662 - RNA, 38 nt, Artificial Sequence
  Description of Artificial Sequence:  Enzymatic Nucleic Acid
caugacuacugaugaggccguuaggccgaaaaauauag

SEQ ID NO: 10663 - RNA, 38 nt, Artificial Sequence
  Description of Artificial Sequence:  Enzymatic Nucleic Acid
aucaugaccugaugaggccguuaggccgaaagaaauau

SEQ ID NO: 10664 - RNA, 38 nt, Artificial Sequence
  Description of Artificial Sequence:  Enzymatic Nucleic Acid
uucaucaucugaugaggccguuaggccgaaacuagaaa

SEQ ID NO: 10665 - RNA, 38 nt, Artificial Sequence
  Description of Artificial Sequence:  Enzymatic Nucleic Acid
auacaaaacugaugaggccguuaggccgaaacauucau

SEQ ID NO: 10666 - RNA, 38 nt, Artificial Sequence
  Description of Artificial Sequence:  Enzymatic Nucleic Acid
guauacaacugaugaggccguuaggccgaaauacauuc

SEQ ID NO: 10667 - RNA, 38 nt, Artificial Sequence
  Description of Artificial Sequence:  Enzymatic Nucleic Acid
gguauacacugaugaggccguuaggccgaaaauacauu

SEQ ID NO: 10668 - RNA, 38 nt, Artificial Sequence
  Description of Artificial Sequence:  Enzymatic Nucleic Acid
ugguauaccugaugaggccguuaggccgaaaaauacau

SEQ ID NO: 10669 - RNA, 38 nt, Artificial Sequence
  Description of Artificial Sequence:  Enzymatic Nucleic Acid
agaugguacugaugaggccguuaggccgaaacaaaaua

SEQ ID NO: 10670 - RNA, 38 nt, Artificial Sequence
  Description of Artificial Sequence:  Enzymatic Nucleic Acid
gaagauggcugaugaggccguuaggccgaaauacaaaa

SEQ ID NO: 10671 - RNA, 38 nt, Artificial Sequence
  Description of Artificial Sequence:  Enzymatic Nucleic Acid
uauaugaacugaugaggccguuaggccgaaaugguaua

SEQ ID NO: 10672 - RNA, 38 nt, Artificial Sequence
  Description of Artificial Sequence:  Enzymatic Nucleic Acid
auuauaugcugaugaggccguuaggccgaaagauggua

SEQ ID NO: 10673 - RNA, 38 nt, Artificial Sequence
  Description of Artificial Sequence:  Enzymatic Nucleic Acid
uauuauaucugaugaggccguuaggccgaaaagauggu

SEQ ID NO: 10674 - RNA, 38 nt, Artificial Sequence
  Description of Artificial Sequence:  Enzymatic Nucleic Acid
guauauuacugaugaggccguuaggccgaaaugaagau

SEQ ID NO: 10675 - RNA, 38 nt, Artificial Sequence
  Description of Artificial Sequence:  Enzymatic Nucleic Acid
aaguauaucugaugaggccguuaggccgaaauaugaag

SEQ ID NO: 10676 - RNA, 38 nt, Artificial Sequence
  Description of Artificial Sequence:  Enzymatic Nucleic Acid
uuuaaguacugaugaggccguuaggccgaaauuauaug

SEQ ID NO: 10677 - RNA, 38 nt, Artificial Sequence
  Description of Artificial Sequence:  Enzymatic Nucleic Acid
uuuuuaagcugaugaggccguuaggccgaaauauuaua

SEQ ID NO: 10678 - RNA, 38 nt, Artificial Sequence
  Description of Artificial Sequence:  Enzymatic Nucleic Acid
auauuuuucugaugaggccguuaggccgaaaguauauu

SEQ ID NO: 10679 - RNA, 38 nt, Artificial Sequence
  Description of Artificial Sequence:  Enzymatic Nucleic Acid
aauauuuucugaugaggccguuaggccgaaaaguauau

SEQ ID NO: 10680 - RNA, 38 nt, Artificial Sequence
  Description of Artificial Sequence:  Enzymatic Nucleic Acid
uuaagaaacugaugaggccguuaggccgaaauuuuuaa

SEQ ID NO: 10681 - RNA, 38 nt, Artificial Sequence
  Description of Artificial Sequence:  Enzymatic Nucleic Acid
aauuaagacugaugaggccguuaggccgaaauauuuuu

SEQ ID NO: 10682 - RNA, 38 nt, Artificial Sequence
  Description of Artificial Sequence:  Enzymatic Nucleic Acid
caauuaagcugaugaggccguuaggccgaaaauauuuu

SEQ ID NO: 10683 - RNA, 38 nt, Artificial Sequence
  Description of Artificial Sequence:  Enzymatic Nucleic Acid
ccaauuaacugaugaggccguuaggccgaaaaauauuu

SEQ ID NO: 10684 - RNA, 38 nt, Artificial Sequence
  Description of Artificial Sequence:  Enzymatic Nucleic Acid
ucccaauucugaugaggccguuaggccgaaagaaauau

SEQ ID NO: 10685 - RNA, 38 nt, Artificial Sequence
  Description of Artificial Sequence:  Enzymatic Nucleic Acid
aucccaaucugaugaggccguuaggccgaaaagaaaua

SEQ ID NO: 10686 - RNA, 38 nt, Artificial Sequence
  Description of Artificial Sequence:  Enzymatic Nucleic Acid
caaauccccugaugaggccguuaggccgaaauuaagaa

SEQ ID NO: 10687 - RNA, 38 nt, Artificial Sequence
  Description of Artificial Sequence:  Enzymatic Nucleic Acid
cgauuacacugaugaggccguuaggccgaaaucccaau

SEQ ID NO: 10688 - RNA, 38 nt, Artificial Sequence
  Description of Artificial Sequence:  Enzymatic Nucleic Acid
acgauuaccugaugaggccguuaggccgaaaaucccaa

SEQ ID NO: 10689 - RNA, 38 nt, Artificial Sequence
  Description of Artificial Sequence:  Enzymatic Nucleic Acid
gguacgaucugaugaggccguuaggccgaaacaaaucc

SEQ ID NO: 10690 - RNA, 38 nt, Artificial Sequence
  Description of Artificial Sequence:  Enzymatic Nucleic Acid
guugguaccugaugaggccguuaggccgaaauuacaaa

SEQ ID NO: 10691 - RNA, 38 nt, Artificial Sequence
  Description of Artificial Sequence:  Enzymatic Nucleic Acid
uaaguuggcugaugaggccguuaggccgaaacgauuac

SEQ ID NO: 10692 - RNA, 38 nt, Artificial Sequence
  Description of Artificial Sequence:  Enzymatic Nucleic Acid
uaucaauucugaugaggccguuaggccgaaaguuggua

SEQ ID NO: 10693 - RNA, 38 nt, Artificial Sequence
  Description of Artificial Sequence:  Enzymatic Nucleic Acid
uuaucaaucugaugaggccguuaggccgaaaaguuggu

SEQ ID NO: 10694 - RNA, 38 nt, Artificial Sequence
  Description of Artificial Sequence:  Enzymatic Nucleic Acid
aguuuauccugaugaggccguuaggccgaaauuaaguu

SEQ ID NO: 10695 - RNA, 38 nt, Artificial Sequence
  Description of Artificial Sequence:  Enzymatic Nucleic Acid
gccaaguucugaugaggccguuaggccgaaaucaauua

SEQ ID NO: 10696 - RNA, 38 nt, Artificial Sequence
  Description of Artificial Sequence:  Enzymatic Nucleic Acid
caguugcccugaugaggccguuaggccgaaaguuuauc

SEQ ID NO: 10697 - RNA, 38 nt, Artificial Sequence
  Description of Artificial Sequence:  Enzymatic Nucleic Acid
gaacauaacugaugaggccguuaggccgaaagcaguug

SEQ ID NO: 10698 - RNA, 38 nt, Artificial Sequence
  Description of Artificial Sequence:  Enzymatic Nucleic Acid
agaacauacugaugaggccguuaggccgaaaagcaguu

SEQ ID NO: 10699 - RNA, 38 nt, Artificial Sequence
  Description of Artificial Sequence:  Enzymatic Nucleic Acid
cagaacaucugaugaggccguuaggccgaaaaagcagu

SEQ ID NO: 10700 - RNA, 38 nt, Artificial Sequence
  Description of Artificial Sequence:  Enzymatic Nucleic Acid
acagaacacugaugaggccguuaggccgaaaaaagcag

SEQ ID NO: 10701 - RNA, 38 nt, Artificial Sequence
  Description of Artificial Sequence:  Enzymatic Nucleic Acid
ggagacagcugaugaggccguuaggccgaaacauaaaa

SEQ ID NO: 10702 - RNA, 38 nt, Artificial Sequence
  Description of Artificial Sequence:  Enzymatic Nucleic Acid
aggagacacugaugaggccguuaggccgaaaacauaaa

SEQ ID NO: 10703 - RNA, 38 nt, Artificial Sequence
  Description of Artificial Sequence:  Enzymatic Nucleic Acid
uggaaggacugaugaggccguuaggccgaaacagaaca

SEQ ID NO: 10704 - RNA, 38 nt, Artificial Sequence
  Description of Artificial Sequence:  Enzymatic Nucleic Acid
uauggaagcugaugaggccguuaggccgaaagacagaa

SEQ ID NO: 10705 - RNA, 38 nt, Artificial Sequence
  Description of Artificial Sequence:  Enzymatic Nucleic Acid
auuuauggcugaugaggccguuaggccgaaaggagaca

SEQ ID NO: 10706 - RNA, 38 nt, Artificial Sequence
  Description of Artificial Sequence:  Enzymatic Nucleic Acid
aauuuaugcugaugaggccguuaggccgaaaaggagac

SEQ ID NO: 10707 - RNA, 38 nt, Artificial Sequence
  Description of Artificial Sequence:  Enzymatic Nucleic Acid
gaaaaauucugaugaggccguuaggccgaaauggaagg

SEQ ID NO: 10708 - RNA, 38 nt, Artificial Sequence
  Description of Artificial Sequence:  Enzymatic Nucleic Acid
uuuugaaacugaugaggccguuaggccgaaauuuaugg

SEQ ID NO: 10709 - RNA, 38 nt, Artificial Sequence
  Description of Artificial Sequence:  Enzymatic Nucleic Acid
auuuugaacugaugaggccguuaggccgaaaauuuaug

SEQ ID NO: 10710 - RNA, 38 nt, Artificial Sequence
  Description of Artificial Sequence:  Enzymatic Nucleic Acid
uauuuugacugaugaggccguuaggccgaaaaauuuau

SEQ ID NO: 10711 - RNA, 38 nt, Artificial Sequence
  Description of Artificial Sequence:  Enzymatic Nucleic Acid
guauuuugcugaugaggccguuaggccgaaaaaauuua

SEQ ID NO: 10712 - RNA, 38 nt, Artificial Sequence
  Description of Artificial Sequence:  Enzymatic Nucleic Acid
aguauuuucugaugaggccguuaggccgaaaaaaauuu

SEQ ID NO: 10713 - RNA, 38 nt, Artificial Sequence
  Description of Artificial Sequence:  Enzymatic Nucleic Acid
ugaauuagcugaugaggccguuaggccgaaauuuugaa

SEQ ID NO: 10714 - RNA, 38 nt, Artificial Sequence
  Description of Artificial Sequence:  Enzymatic Nucleic Acid
uguugaaucugaugaggccguuaggccgaaaguauuuu

SEQ ID NO: 10715 - RNA, 38 nt, Artificial Sequence
  Description of Artificial Sequence:  Enzymatic Nucleic Acid
cuuuguugcugaugaggccguuaggccgaaauuaguau

SEQ ID NO: 10716 - RNA, 38 nt, Artificial Sequence
  Description of Artificial Sequence:  Enzymatic Nucleic Acid
ucuuuguucugaugaggccguuaggccgaaaauuagua

SEQ ID NO: 10717 - RNA, 38 nt, Artificial Sequence
  Description of Artificial Sequence:  Enzymatic Nucleic Acid
aaaaaaaacugaugaggccguuaggccgaaagcuuuuu

SEQ ID NO: 10718 - RNA, 38 nt, Artificial Sequence
  Description of Artificial Sequence:  Enzymatic Nucleic Acid
ggaaaaaacugaugaggccguuaggccgaaagagcuuu

SEQ ID NO: 10719 - RNA, 38 nt, Artificial Sequence
  Description of Artificial Sequence:  Enzymatic Nucleic Acid
aggaaaaacugaugaggccguuaggccgaaaagagcuu

SEQ ID NO: 10720 - RNA, 38 nt, Artificial Sequence
  Description of Artificial Sequence:  Enzymatic Nucleic Acid
uaggaaaacugaugaggccguuaggccgaaaaagagcu

SEQ ID NO: 10721 - RNA, 38 nt, Artificial Sequence
  Description of Artificial Sequence:  Enzymatic Nucleic Acid
uuaggaaacugaugaggccguuaggccgaaaaaagagc

SEQ ID NO: 10722 - RNA, 38 nt, Artificial Sequence
  Description of Artificial Sequence:  Enzymatic Nucleic Acid
uuuaggaacugaugaggccguuaggccgaaaaaaagag

SEQ ID NO: 10723 - RNA, 38 nt, Artificial Sequence
  Description of Artificial Sequence:  Enzymatic Nucleic Acid
uuuuaggacugaugaggccguuaggccgaaaaaaaaga

SEQ ID NO: 10724 - RNA, 38 nt, Artificial Sequence
  Description of Artificial Sequence:  Enzymatic Nucleic Acid
auuuuaggcugaugaggccguuaggccgaaaaaaaaag

SEQ ID NO: 10725 - RNA, 38 nt, Artificial Sequence
  Description of Artificial Sequence:  Enzymatic Nucleic Acid
uauuuuagcugaugaggccguuaggccgaaaaaaaaaa

SEQ ID NO: 10726 - RNA, 38 nt, Artificial Sequence
  Description of Artificial Sequence:  Enzymatic Nucleic Acid
guuuauuucugaugaggccguuaggccgaaaggaaaaa

SEQ ID NO: 10727 - RNA, 38 nt, Artificial Sequence
  Description of Artificial Sequence:  Enzymatic Nucleic Acid
uuugaguucugaugaggccguuaggccgaaauuuuagg

SEQ ID NO: 10728 - RNA, 38 nt, Artificial Sequence
  Description of Artificial Sequence:  Enzymatic Nucleic Acid
auaaauuucugaugaggccguuaggccgaaaguuuauu

SEQ ID NO: 10729 - RNA, 38 nt, Artificial Sequence
  Description of Artificial Sequence:  Enzymatic Nucleic Acid
caaggauacugaugaggccguuaggccgaaauuugagu

SEQ ID NO: 10730 - RNA, 38 nt, Artificial Sequence
  Description of Artificial Sequence:  Enzymatic Nucleic Acid
acaaggaucugaugaggccguuaggccgaaaauuugag

SEQ ID NO: 10731 - RNA, 38 nt, Artificial Sequence
  Description of Artificial Sequence:  Enzymatic Nucleic Acid
aacaaggacugaugaggccguuaggccgaaaaauuuga

SEQ ID NO: 10732 - RNA, 38 nt, Artificial Sequence
  Description of Artificial Sequence:  Enzymatic Nucleic Acid
uaaacaagcugaugaggccguuaggccgaaauaaauuu

SEQ ID NO: 10733 - RNA, 38 nt, Artificial Sequence
  Description of Artificial Sequence:  Enzymatic Nucleic Acid
cucuaaaccugaugaggccguuaggccgaaaggauaaa

SEQ ID NO: 10734 - RNA, 38 nt, Artificial Sequence
  Description of Artificial Sequence:  Enzymatic Nucleic Acid
cugcucuacugaugaggccguuaggccgaaacaaggau

SEQ ID NO: 10735 - RNA, 38 nt, Artificial Sequence
  Description of Artificial Sequence:  Enzymatic Nucleic Acid
ucugcucucugaugaggccguuaggccgaaaacaagga

SEQ ID NO: 10736 - RNA, 38 nt, Artificial Sequence
  Description of Artificial Sequence:  Enzymatic Nucleic Acid
cucugcuccugaugaggccguuaggccgaaaaacaagg

SEQ ID NO: 10737 - RNA, 38 nt, Artificial Sequence
  Description of Artificial Sequence:  Enzymatic Nucleic Acid
uuuuucuucugaugaggccguuaggccgaaauuuuucu

SEQ ID NO: 10738 - RNA, 38 nt, Artificial Sequence
  Description of Artificial Sequence:  Enzymatic Nucleic Acid
guuuuucucugaugaggccguuaggccgaaaauuuuuc

SEQ ID NO: 10739 - RNA, 38 nt, Artificial Sequence
  Description of Artificial Sequence:  Enzymatic Nucleic Acid
ccauuucacugaugaggccguuaggccgaaaguuuuuc

SEQ ID NO: 10740 - RNA, 38 nt, Artificial Sequence
  Description of Artificial Sequence:  Enzymatic Nucleic Acid
accauuuccugaugaggccguuaggccgaaaaguuuuu

SEQ ID NO: 10741 - RNA, 38 nt, Artificial Sequence
  Description of Artificial Sequence:  Enzymatic Nucleic Acid
uuuuuugacugaugaggccguuaggccgaaaccauuuc

SEQ ID NO: 10742 - RNA, 38 nt, Artificial Sequence
  Description of Artificial Sequence:  Enzymatic Nucleic Acid
aauuuuuucugaugaggccguuaggccgaaagaccauu

SEQ ID NO: 10743 - RNA, 38 nt, Artificial Sequence
  Description of Artificial Sequence:  Enzymatic Nucleic Acid
uauuuagccugaugaggccguuaggccgaaauuuuuug

SEQ ID NO: 10744 - RNA, 38 nt, Artificial Sequence
  Description of Artificial Sequence:  Enzymatic Nucleic Acid
aaaauauucugaugaggccguuaggccgaaagcaauuu

SEQ ID NO: 10745 - RNA, 38 nt, Artificial Sequence
  Description of Artificial Sequence:  Enzymatic Nucleic Acid
auugaaaacugaugaggccguuaggccgaaauuuagca

SEQ ID NO: 10746 - RNA, 38 nt, Artificial Sequence
  Description of Artificial Sequence:  Enzymatic Nucleic Acid
ccauugaacugaugaggccguuaggccgaaauauuuag

SEQ ID NO: 10747 - RNA, 38 nt, Artificial Sequence
  Description of Artificial Sequence:  Enzymatic Nucleic Acid
uccauugacugaugaggccguuaggccgaaaauauuua

SEQ ID NO: 10748 - RNA, 38 nt, Artificial Sequence
  Description of Artificial Sequence:  Enzymatic Nucleic Acid
uuccauugcugaugaggccguuaggccgaaaaauauuu

SEQ ID NO: 10749 - RNA, 38 nt, Artificial Sequence
  Description of Artificial Sequence:  Enzymatic Nucleic Acid
uuuccauucugaugaggccguuaggccgaaaaaauauu

SEQ ID NO: 10750 - RNA, 38 nt, Artificial Sequence
  Description of Artificial Sequence:  Enzymatic Nucleic Acid
cuaacauucugaugaggccguuaggccgaaaguuuucc

SEQ ID NO: 10751 - RNA, 38 nt, Artificial Sequence
  Description of Artificial Sequence:  Enzymatic Nucleic Acid
gcuaaacucugaugaggccguuaggccgaaacauuuag

SEQ ID NO: 10752 - RNA, 38 nt, Artificial Sequence
  Description of Artificial Sequence:  Enzymatic Nucleic Acid
agcuaaaccugaugaggccguuaggccgaaaacauuua

SEQ ID NO: 10753 - RNA, 38 nt, Artificial Sequence
  Description of Artificial Sequence:  Enzymatic Nucleic Acid
aucagcuacugaugaggccguuaggccgaaacuaacau

SEQ ID NO: 10754 - RNA, 38 nt, Artificial Sequence
  Description of Artificial Sequence:  Enzymatic Nucleic Acid
aaucagcucugaugaggccguuaggccgaaaacuaaca

SEQ ID NO: 10755 - RNA, 38 nt, Artificial Sequence
  Description of Artificial Sequence:  Enzymatic Nucleic Acid
caaucagccugaugaggccguuaggccgaaaaacuaac

SEQ ID NO: 10756 - RNA, 38 nt, Artificial Sequence
  Description of Artificial Sequence:  Enzymatic Nucleic Acid
ccccauaccugaugaggccguuaggccgaaaucagcua

SEQ ID NO: 10757 - RNA, 38 nt, Artificial Sequence
  Description of Artificial Sequence:  Enzymatic Nucleic Acid
aaaccccacugaugaggccguuaggccgaaacaaucag

SEQ ID NO: 10758 - RNA, 38 nt, Artificial Sequence
  Description of Artificial Sequence:  Enzymatic Nucleic Acid
gguucgaacugaugaggccguuaggccgaaaccccaua

SEQ ID NO: 10759 - RNA, 38 nt, Artificial Sequence
  Description of Artificial Sequence:  Enzymatic Nucleic Acid
agguucgacugaugaggccguuaggccgaaaaccccau

SEQ ID NO: 10760 - RNA, 38 nt, Artificial Sequence
  Description of Artificial Sequence:  Enzymatic Nucleic Acid
aagguucgcugaugaggccguuaggccgaaaaacccca

SEQ ID NO: 10761 - RNA, 38 nt, Artificial Sequence
  Description of Artificial Sequence:  Enzymatic Nucleic Acid
aaagguuccugaugaggccguuaggccgaaaaaacccc

SEQ ID NO: 10762 - RNA, 38 nt, Artificial Sequence
  Description of Artificial Sequence:  Enzymatic Nucleic Acid
aaaagugacugaugaggccguuaggccgaaagguucga

SEQ ID NO: 10763 - RNA, 38 nt, Artificial Sequence
  Description of Artificial Sequence:  Enzymatic Nucleic Acid
aaaaagugcugaugaggccguuaggccgaaaagguucg

SEQ ID NO: 10764 - RNA, 38 nt, Artificial Sequence
  Description of Artificial Sequence:  Enzymatic Nucleic Acid
caaaaagucugaugaggccguuaggccgaaaaagguuc

SEQ ID NO: 10765 - RNA, 38 nt, Artificial Sequence
  Description of Artificial Sequence:  Enzymatic Nucleic Acid
caaacaaacugaugaggccguuaggccgaaagugaaag

SEQ ID NO: 10766 - RNA, 38 nt, Artificial Sequence
  Description of Artificial Sequence:  Enzymatic Nucleic Acid
acaaacaacugaugaggccguuaggccgaaaagugaaa

SEQ ID NO: 10767 - RNA, 38 nt, Artificial Sequence
  Description of Artificial Sequence:  Enzymatic Nucleic Acid
aacaaacacugaugaggccguuaggccgaaaaagugaa

SEQ ID NO: 10768 - RNA, 38 nt, Artificial Sequence
  Description of Artificial Sequence:  Enzymatic Nucleic Acid
aaacaaaccugaugaggccguuaggccgaaaaaaguga

SEQ ID NO: 10769 - RNA, 38 nt, Artificial Sequence
  Description of Artificial Sequence:  Enzymatic Nucleic Acid
guaaaacacugaugaggccguuaggccgaaacaaaaag

SEQ ID NO: 10770 - RNA, 38 nt, Artificial Sequence
  Description of Artificial Sequence:  Enzymatic Nucleic Acid
gguaaaaccugaugaggccguuaggccgaaaacaaaaa

SEQ ID NO: 10771 - RNA, 38 nt, Artificial Sequence
  Description of Artificial Sequence:  Enzymatic Nucleic Acid
auagguaacugaugaggccguuaggccgaaacaaacaa

SEQ ID NO: 10772 - RNA, 38 nt, Artificial Sequence
  Description of Artificial Sequence:  Enzymatic Nucleic Acid
aauagguacugaugaggccguuaggccgaaaacaaaca

SEQ ID NO: 10773 - RNA, 38 nt, Artificial Sequence
  Description of Artificial Sequence:  Enzymatic Nucleic Acid
aaauaggucugaugaggccguuaggccgaaaaacaaac

SEQ ID NO: 10774 - RNA, 38 nt, Artificial Sequence
  Description of Artificial Sequence:  Enzymatic Nucleic Acid
gaaauaggcugaugaggccguuaggccgaaaaaacaaa

SEQ ID NO: 10775 - RNA, 38 nt, Artificial Sequence
  Description of Artificial Sequence:  Enzymatic Nucleic Acid
uugugaaacugaugaggccguuaggccgaaagguaaaa

SEQ ID NO: 10776 - RNA, 38 nt, Artificial Sequence
  Description of Artificial Sequence:  Enzymatic Nucleic Acid
aguugugacugaugaggccguuaggccgaaauagguaa

SEQ ID NO: 10777 - RNA, 38 nt, Artificial Sequence
  Description of Artificial Sequence:  Enzymatic Nucleic Acid
caguugugcugaugaggccguuaggccgaaaauaggua

SEQ ID NO: 10778 - RNA, 38 nt, Artificial Sequence
  Description of Artificial Sequence:  Enzymatic Nucleic Acid
acaguugucugaugaggccguuaggccgaaaaauaggu

SEQ ID NO: 10779 - RNA, 38 nt, Artificial Sequence
  Description of Artificial Sequence:  Enzymatic Nucleic Acid
uggcaauucugaugaggccguuaggccgaaacacaguu

SEQ ID NO: 10780 - RNA, 38 nt, Artificial Sequence
  Description of Artificial Sequence:  Enzymatic Nucleic Acid
uuauuggccugaugaggccguuaggccgaaauuuacac

SEQ ID NO: 10781 - RNA, 38 nt, Artificial Sequence
  Description of Artificial Sequence:  Enzymatic Nucleic Acid
acaggaaucugaugaggccguuaggccgaaauuggcaa

SEQ ID NO: 10782 - RNA, 38 nt, Artificial Sequence
  Description of Artificial Sequence:  Enzymatic Nucleic Acid
uggacaggcugaugaggccguuaggccgaaauuauugg

SEQ ID NO: 10783 - RNA, 38 nt, Artificial Sequence
  Description of Artificial Sequence:  Enzymatic Nucleic Acid
auggacagcugaugaggccguuaggccgaaaauuauug

SEQ ID NO: 10784 - RNA, 38 nt, Artificial Sequence
  Description of Artificial Sequence:  Enzymatic Nucleic Acid
uuuucaugcugaugaggccguuaggccgaaacaggaau

SEQ ID NO: 10785 - RNA, 38 nt, Artificial Sequence
  Description of Artificial Sequence:  Enzymatic Nucleic Acid
cacuggaucugaugaggccguuaggccgaaauuugcau

SEQ ID NO: 10786 - RNA, 38 nt, Artificial Sequence
  Description of Artificial Sequence:  Enzymatic Nucleic Acid
acacuggacugaugaggccguuaggccgaaaauuugca

SEQ ID NO: 10787 - RNA, 38 nt, Artificial Sequence
  Description of Artificial Sequence:  Enzymatic Nucleic Acid
cuacacugcugaugaggccguuaggccgaaauaauuug

SEQ ID NO: 10788 - RNA, 38 nt, Artificial Sequence
  Description of Artificial Sequence:  Enzymatic Nucleic Acid
aauauauccugaugaggccguuaggccgaaacacugga

SEQ ID NO: 10789 - RNA, 38 nt, Artificial Sequence
  Description of Artificial Sequence:  Enzymatic Nucleic Acid
gucaaauacugaugaggccguuaggccgaaaucuacac

SEQ ID NO: 10790 - RNA, 38 nt, Artificial Sequence
  Description of Artificial Sequence:  Enzymatic Nucleic Acid
uggucaaacugaugaggccguuaggccgaaauaucuac

SEQ ID NO: 10791 - RNA, 38 nt, Artificial Sequence
  Description of Artificial Sequence:  Enzymatic Nucleic Acid
gauggucacugaugaggccguuaggccgaaauauaucu

SEQ ID NO: 10792 - RNA, 38 nt, Artificial Sequence
  Description of Artificial Sequence:  Enzymatic Nucleic Acid
ugaugguccugaugaggccguuaggccgaaaauauauc

SEQ ID NO: 10793 - RNA, 38 nt, Artificial Sequence
  Description of Artificial Sequence:  Enzymatic Nucleic Acid
cauagggucugaugaggccguuaggccgaaauggucaa

SEQ ID NO: 10794 - RNA, 38 nt, Artificial Sequence
  Description of Artificial Sequence:  Enzymatic Nucleic Acid
aauauccacugaugaggccguuaggccgaaagggugau

SEQ ID NO: 10795 - RNA, 38 nt, Artificial Sequence
  Description of Artificial Sequence:  Enzymatic Nucleic Acid
cuagccaacugaugaggccguuaggccgaaauccauag

SEQ ID NO: 10796 - RNA, 38 nt, Artificial Sequence
  Description of Artificial Sequence:  Enzymatic Nucleic Acid
aacuagcccugaugaggccguuaggccgaaauauccau

SEQ ID NO: 10797 - RNA, 38 nt, Artificial Sequence
  Description of Artificial Sequence:  Enzymatic Nucleic Acid
ggcaaaaccugaugaggccguuaggccgaaagccaaua

SEQ ID NO: 10798 - RNA, 38 nt, Artificial Sequence
  Description of Artificial Sequence:  Enzymatic Nucleic Acid
aaaggcaacugaugaggccguuaggccgaaacuagcca

SEQ ID NO: 10799 - RNA, 38 nt, Artificial Sequence
  Description of Artificial Sequence:  Enzymatic Nucleic Acid
uaaaggcacugaugaggccguuaggccgaaaacuagcc

SEQ ID NO: 10800 - RNA, 38 nt, Artificial Sequence
  Description of Artificial Sequence:  Enzymatic Nucleic Acid
auaaaggccugaugaggccguuaggccgaaaaacuagc

SEQ ID NO: 10801 - RNA, 38 nt, Artificial Sequence
  Description of Artificial Sequence:  Enzymatic Nucleic Acid
gcuuaauacugaugaggccguuaggccgaaaggcaaaa

SEQ ID NO: 10802 - RNA, 38 nt, Artificial Sequence
  Description of Artificial Sequence:  Enzymatic Nucleic Acid
ugcuuaaucugaugaggccguuaggccgaaaaggcaaa

SEQ ID NO: 10803 - RNA, 38 nt, Artificial Sequence
  Description of Artificial Sequence:  Enzymatic Nucleic Acid
uugcuuaacugaugaggccguuaggccgaaaaaggcaa

SEQ ID NO: 10804 - RNA, 38 nt, Artificial Sequence
  Description of Artificial Sequence:  Enzymatic Nucleic Acid
auuugcuucugaugaggccguuaggccgaaauaaaggc

SEQ ID NO: 10805 - RNA, 38 nt, Artificial Sequence
  Description of Artificial Sequence:  Enzymatic Nucleic Acid
aauuugcucugaugaggccguuaggccgaaaauaaagg

SEQ ID NO: 10806 - RNA, 38 nt, Artificial Sequence
  Description of Artificial Sequence:  Enzymatic Nucleic Acid
cugaaaugcugaugaggccguuaggccgaaauuugcuu

SEQ ID NO: 10807 - RNA, 38 nt, Artificial Sequence
  Description of Artificial Sequence:  Enzymatic Nucleic Acid
gcugaaaucugaugaggccguuaggccgaaaauuugcu

SEQ ID NO: 10808 - RNA, 38 nt, Artificial Sequence
  Description of Artificial Sequence:  Enzymatic Nucleic Acid
caggcugacugaugaggccguuaggccgaaaugaauuu

SEQ ID NO: 10809 - RNA, 38 nt, Artificial Sequence
  Description of Artificial Sequence:  Enzymatic Nucleic Acid
ucaggcugcugaugaggccguuaggccgaaaaugaauu

SEQ ID NO: 10810 - RNA, 38 nt, Artificial Sequence
  Description of Artificial Sequence:  Enzymatic Nucleic Acid
uucaggcucugaugaggccguuaggccgaaaaaugaau

SEQ ID NO: 10811 - RNA, 38 nt, Artificial Sequence
  Description of Artificial Sequence:  Enzymatic Nucleic Acid
uauaggcacugaugaggccguuaggccgaaacauucag

SEQ ID NO: 10812 - RNA, 38 nt, Artificial Sequence
  Description of Artificial Sequence:  Enzymatic Nucleic Acid
agaauauacugaugaggccguuaggccgaaaggcagac

SEQ ID NO: 10813 - RNA, 38 nt, Artificial Sequence
  Description of Artificial Sequence:  Enzymatic Nucleic Acid
agagaauacugaugaggccguuaggccgaaauaggcag

SEQ ID NO: 10814 - RNA, 38 nt, Artificial Sequence
  Description of Artificial Sequence:  Enzymatic Nucleic Acid
gcagagaacugaugaggccguuaggccgaaauauaggc

SEQ ID NO: 10815 - RNA, 38 nt, Artificial Sequence
  Description of Artificial Sequence:  Enzymatic Nucleic Acid
gagcagagcugaugaggccguuaggccgaaauauauag

SEQ ID NO: 10816 - RNA, 38 nt, Artificial Sequence
  Description of Artificial Sequence:  Enzymatic Nucleic Acid
agagcagacugaugaggccguuaggccgaaaauauaua

SEQ ID NO: 10817 - RNA, 38 nt, Artificial Sequence
  Description of Artificial Sequence:  Enzymatic Nucleic Acid
aaagagcacugaugaggccguuaggccgaaagaauaua

SEQ ID NO: 10818 - RNA, 38 nt, Artificial Sequence
  Description of Artificial Sequence:  Enzymatic Nucleic Acid
aauacaaacugaugaggccguuaggccgaaagcagaga

SEQ ID NO: 10819 - RNA, 38 nt, Artificial Sequence
  Description of Artificial Sequence:  Enzymatic Nucleic Acid
agaauacacugaugaggccguuaggccgaaagagcaga

SEQ ID NO: 10820 - RNA, 38 nt, Artificial Sequence
  Description of Artificial Sequence:  Enzymatic Nucleic Acid
gagaauaccugaugaggccguuaggccgaaaagagcag

SEQ ID NO: 10821 - RNA, 38 nt, Artificial Sequence
  Description of Artificial Sequence:  Enzymatic Nucleic Acid
aaggagaacugaugaggccguuaggccgaaacaaagag

SEQ ID NO: 10822 - RNA, 38 nt, Artificial Sequence
  Description of Artificial Sequence:  Enzymatic Nucleic Acid
caaaggagcugaugaggccguuaggccgaaauacaaag

SEQ ID NO: 10823 - RNA, 38 nt, Artificial Sequence
  Description of Artificial Sequence:  Enzymatic Nucleic Acid
ucaaaggacugaugaggccguuaggccgaaaauacaaa

SEQ ID NO: 10824 - RNA, 38 nt, Artificial Sequence
  Description of Artificial Sequence:  Enzymatic Nucleic Acid
guucaaagcugaugaggccguuaggccgaaagaauaca

SEQ ID NO: 10825 - RNA, 38 nt, Artificial Sequence
  Description of Artificial Sequence:  Enzymatic Nucleic Acid
cggguucacugaugaggccguuaggccgaaaggagaau

SEQ ID NO: 10826 - RNA, 38 nt, Artificial Sequence
  Description of Artificial Sequence:  Enzymatic Nucleic Acid
acggguuccugaugaggccguuaggccgaaaaggagaa

SEQ ID NO: 10827 - RNA, 38 nt, Artificial Sequence
  Description of Artificial Sequence:  Enzymatic Nucleic Acid
gauguuuucugaugaggccguuaggccgaaacggguuc

SEQ ID NO: 10828 - RNA, 38 nt, Artificial Sequence
  Description of Artificial Sequence:  Enzymatic Nucleic Acid
ggauguuucugaugaggccguuaggccgaaaacggguu

SEQ ID NO: 10829 - RNA, 38 nt, Artificial Sequence
  Description of Artificial Sequence:  Enzymatic Nucleic Acid
ugccacagcugaugaggccguuaggccgaaauguuuua

SEQ ID NO: 10830 - RNA, 54 nt, Artificial Sequence
  Description of Artificial Sequence:  Enzymatic Nucleic Acid
cggggaggagaagagaggaccagagaaacacacguugugguacauuaccuggua

SEQ ID NO: 10831 - RNA, 54 nt, Artificial Sequence
  Description of Artificial Sequence:  Enzymatic Nucleic Acid
ccgcuccgagaagccgccaccagagaaacacacguugugguacauuaccuggua

SEQ ID NO: 10832 - RNA, 54 nt, Artificial Sequence
  Description of Artificial Sequence:  Enzymatic Nucleic Acid
ccgccagaagaaguccucaccagagaaacacacguugugguacauuaccuggua

SEQ ID NO: 10833 - RNA, 54 nt, Artificial Sequence
  Description of Artificial Sequence:  Enzymatic Nucleic Acid
aacgacccagaagccagaaccagagaaacacacguugugguacauuaccuggua

SEQ ID NO: 10834 - RNA, 54 nt, Artificial Sequence
  Description of Artificial Sequence:  Enzymatic Nucleic Acid
gcgcgcacagaaggacccaccagagaaacacacguugugguacauuaccuggua

SEQ ID NO: 10835 - RNA, 54 nt, Artificial Sequence
  Description of Artificial Sequence:  Enzymatic Nucleic Acid
gacagcugagaagcgcgcaccagagaaacacacguugugguacauuaccuggua

SEQ ID NO: 10836 - RNA, 54 nt, Artificial Sequence
  Description of Artificial Sequence:  Enzymatic Nucleic Acid
aagcagacagaagagcagaccagagaaacacacguugugguacauuaccuggua

SEQ ID NO: 10837 - RNA, 54 nt, Artificial Sequence
  Description of Artificial Sequence:  Enzymatic Nucleic Acid
gagaagcaagaagcugagaccagagaaacacacguugugguacauuaccuggua

SEQ ID NO: 10838 - RNA, 54 nt, Artificial Sequence
  Description of Artificial Sequence:  Enzymatic Nucleic Acid
cugugagaagaagacagcaccagagaaacacacguugugguacauuaccuggua

SEQ ID NO: 10839 - RNA, 54 nt, Artificial Sequence
  Description of Artificial Sequence:  Enzymatic Nucleic Acid
cauuuaugagaagcuuccaccagagaaacacacguugugguacauuaccuggua

SEQ ID NO: 10840 - RNA, 54 nt, Artificial Sequence
  Description of Artificial Sequence:  Enzymatic Nucleic Acid
cuuccacaagaagauuuaaccagagaaacacacguugugguacauuaccuggua

SEQ ID NO: 10841 - RNA, 54 nt, Artificial Sequence
  Description of Artificial Sequence:  Enzymatic Nucleic Acid
uuugcuugagaaguguucaccagagaaacacacguugugguacauuaccuggua

SEQ ID NO: 10842 - RNA, 54 nt, Artificial Sequence
  Description of Artificial Sequence:  Enzymatic Nucleic Acid
auauuugcagaaguagaaaccagagaaacacacguugugguacauuaccuggua

SEQ ID NO: 10843 - RNA, 54 nt, Artificial Sequence
  Description of Artificial Sequence:  Enzymatic Nucleic Acid
cguaacccagaagggaauaccagagaaacacacguugugguacauuaccuggua

SEQ ID NO: 10844 - RNA, 54 nt, Artificial Sequence
  Description of Artificial Sequence:  Enzymatic Nucleic Acid
cguuuuccagaagggaucaccagagaaacacacguugugguacauuaccuggua

SEQ ID NO: 10845 - RNA, 54 nt, Artificial Sequence
  Description of Artificial Sequence:  Enzymatic Nucleic Acid
cuucacagagaagaagccaccagagaaacacacguugugguacauuaccuggua

SEQ ID NO: 10846 - RNA, 54 nt, Artificial Sequence
  Description of Artificial Sequence:  Enzymatic Nucleic Acid
uuuuuuucagaaggguaaaccagagaaacacacguugugguacauuaccuggua

SEQ ID NO: 10847 - RNA, 54 nt, Artificial Sequence
  Description of Artificial Sequence:  Enzymatic Nucleic Acid
gccgguaaagaagcuugcaccagagaaacacacguugugguacauuaccuggua

SEQ ID NO: 10848 - RNA, 54 nt, Artificial Sequence
  Description of Artificial Sequence:  Enzymatic Nucleic Acid
ucauagagagaagguaagaccagagaaacacacguugugguacauuaccuggua

SEQ ID NO: 10849 - RNA, 54 nt, Artificial Sequence
  Description of Artificial Sequence:  Enzymatic Nucleic Acid
aaauagcgagaagauuucaccagagaaacacacguugugguacauuaccuggua

SEQ ID NO: 10850 - RNA, 54 nt, Artificial Sequence
  Description of Artificial Sequence:  Enzymatic Nucleic Acid
uuucguaaagaagggguuaccagagaaacacacguugugguacauuaccuggua

SEQ ID NO: 10851 - RNA, 54 nt, Artificial Sequence
  Description of Artificial Sequence:  Enzymatic Nucleic Acid
agagccggagaaggaaacaccagagaaacacacguugugguacauuaccuggua

SEQ ID NO: 10852 - RNA, 54 nt, Artificial Sequence
  Description of Artificial Sequence:  Enzymatic Nucleic Acid
ggguagagagaagggucuaccagagaaacacacguugugguacauuaccuggua

SEQ ID NO: 10853 - RNA, 54 nt, Artificial Sequence
  Description of Artificial Sequence:  Enzymatic Nucleic Acid
cgguacaaagaaggauuuaccagagaaacacacguugugguacauuaccuggua

SEQ ID NO: 10854 - RNA, 54 nt, Artificial Sequence
  Description of Artificial Sequence:  Enzymatic Nucleic Acid
auucuagaagaagccacaaccagagaaacacacguugugguacauuaccuggua

SEQ ID NO: 10855 - RNA, 54 nt, Artificial Sequence
  Description of Artificial Sequence:  Enzymatic Nucleic Acid
uuuggcacagaagugauaaccagagaaacacacguugugguacauuaccuggua

SEQ ID NO: 10856 - RNA, 54 nt, Artificial Sequence
  Description of Artificial Sequence:  Enzymatic Nucleic Acid
cuccuuccagaagcauuuaccagagaaacacacguugugguacauuaccuggua

SEQ ID NO: 10857 - RNA, 54 nt, Artificial Sequence
  Description of Artificial Sequence:  Enzymatic Nucleic Acid
cugugcaaagaaguuucaaccagagaaacacacguugugguacauuaccuggua

SEQ ID NO: 10858 - RNA, 54 nt, Artificial Sequence
  Description of Artificial Sequence:  Enzymatic Nucleic Acid
agugguggagaagcugauaccagagaaacacacguugugguacauuaccuggua

SEQ ID NO: 10859 - RNA, 54 nt, Artificial Sequence
  Description of Artificial Sequence:  Enzymatic Nucleic Acid
accaagugagaagaggcuaccagagaaacacacguugugguacauuaccuggua

SEQ ID NO: 10860 - RNA, 54 nt, Artificial Sequence
  Description of Artificial Sequence:  Enzymatic Nucleic Acid
uuucaauaagaagcgugcaccagagaaacacacguugugguacauuaccuggua

SEQ ID NO: 10861 - RNA, 54 nt, Artificial Sequence
  Description of Artificial Sequence:  Enzymatic Nucleic Acid
guuccuugagaagugaggaccagagaaacacacguugugguacauuaccuggua

SEQ ID NO: 10862 - RNA, 54 nt, Artificial Sequence
  Description of Artificial Sequence:  Enzymatic Nucleic Acid
uuagagugagaagcuccaaccagagaaacacacguugugguacauuaccuggua

SEQ ID NO: 10863 - RNA, 54 nt, Artificial Sequence
  Description of Artificial Sequence:  Enzymatic Nucleic Acid
gauagguaagaagucuuuaccagagaaacacacguugugguacauuaccuggua

SEQ ID NO: 10864 - RNA, 54 nt, Artificial Sequence
  Description of Artificial Sequence:  Enzymatic Nucleic Acid
ggaacuucagaaggguccaccagagaaacacacguugugguacauuaccuggua

SEQ ID NO: 10865 - RNA, 54 nt, Artificial Sequence
  Description of Artificial Sequence:  Enzymatic Nucleic Acid
cauaagggagaagcucacaccagagaaacacacguugugguacauuaccuggua

SEQ ID NO: 10866 - RNA, 54 nt, Artificial Sequence
  Description of Artificial Sequence:  Enzymatic Nucleic Acid
cagccacaagaaggcacgaccagagaaacacacguugugguacauuaccuggua

SEQ ID NO: 10867 - RNA, 54 nt, Artificial Sequence
  Description of Artificial Sequence:  Enzymatic Nucleic Acid
gcucagucagaagagcuuaccagagaaacacacguugugguacauuaccuggua

SEQ ID NO: 10868 - RNA, 54 nt, Artificial Sequence
  Description of Artificial Sequence:  Enzymatic Nucleic Acid
aggcucccagaagguuaaaccagagaaacacacguugugguacauuaccuggua

SEQ ID NO: 10869 - RNA, 54 nt, Artificial Sequence
  Description of Artificial Sequence:  Enzymatic Nucleic Acid
caaucaccagaagaggccaccagagaaacacacguugugguacauuaccuggua

SEQ ID NO: 10870 - RNA, 54 nt, Artificial Sequence
  Description of Artificial Sequence:  Enzymatic Nucleic Acid
uuccugaaagaaggagcuaccagagaaacacacguugugguacauuaccuggua

SEQ ID NO: 10871 - RNA, 54 nt, Artificial Sequence
  Description of Artificial Sequence:  Enzymatic Nucleic Acid
uagaaaccagaagaauccaccagagaaacacacguugugguacauuaccuggua

SEQ ID NO: 10872 - RNA, 54 nt, Artificial Sequence
  Description of Artificial Sequence:  Enzymatic Nucleic Acid
cuuguagaagaagucagaaccagagaaacacacguugugguacauuaccuggua

SEQ ID NO: 10873 - RNA, 54 nt, Artificial Sequence
  Description of Artificial Sequence:  Enzymatic Nucleic Acid
uguaagaaagaagaucuuaccagagaaacacacguugugguacauuaccuggua

SEQ ID NO: 10874 - RNA, 54 nt, Artificial Sequence
  Description of Artificial Sequence:  Enzymatic Nucleic Acid
cacuugaaagaaguaagaaccagagaaacacacguugugguacauuaccuggua

SEQ ID NO: 10875 - RNA, 54 nt, Artificial Sequence
  Description of Artificial Sequence:  Enzymatic Nucleic Acid
uucuggaaagaaggaacuaccagagaaacacacguugugguacauuaccuggua

SEQ ID NO: 10876 - RNA, 54 nt, Artificial Sequence
  Description of Artificial Sequence:  Enzymatic Nucleic Acid
cucacauaagaaggguucaccagagaaacacacguugugguacauuaccuggua

SEQ ID NO: 10877 - RNA, 54 nt, Artificial Sequence
  Description of Artificial Sequence:  Enzymatic Nucleic Acid
ccucaggcagaagcaaaaaccagagaaacacacguugugguacauuaccuggua

SEQ ID NO: 10878 - RNA, 54 nt, Artificial Sequence
  Description of Artificial Sequence:  Enzymatic Nucleic Acid
ccagcaugagaagauagaaccagagaaacacacguugugguacauuaccuggua

SEQ ID NO: 10879 - RNA, 54 nt, Artificial Sequence
  Description of Artificial Sequence:  Enzymatic Nucleic Acid
ucugugccagaaguccagaccagagaaacacacguugugguacauuaccuggua

SEQ ID NO: 10880 - RNA, 54 nt, Artificial Sequence
  Description of Artificial Sequence:  Enzymatic Nucleic Acid
ucagagaaagaaggaguuaccagagaaacacacguugugguacauuaccuggua

SEQ ID NO: 10881 - RNA, 54 nt, Artificial Sequence
  Description of Artificial Sequence:  Enzymatic Nucleic Acid
aacuucggagaagaaauaaccagagaaacacacguugugguacauuaccuggua

SEQ ID NO: 10882 - RNA, 54 nt, Artificial Sequence
  Description of Artificial Sequence:  Enzymatic Nucleic Acid
cugacaucagaagagcuuaccagagaaacacacguugugguacauuaccuggua

SEQ ID NO: 10883 - RNA, 54 nt, Artificial Sequence
  Description of Artificial Sequence:  Enzymatic Nucleic Acid
gagaggccagaagagugcaccagagaaacacacguugugguacauuaccuggua

SEQ ID NO: 10884 - RNA, 54 nt, Artificial Sequence
  Description of Artificial Sequence:  Enzymatic Nucleic Acid
ugacaucaagaagccccgaccagagaaacacacguugugguacauuaccuggua

SEQ ID NO: 10885 - RNA, 54 nt, Artificial Sequence
  Description of Artificial Sequence:  Enzymatic Nucleic Acid
cugcugacagaagacagcaccagagaaacacacguugugguacauuaccuggua

SEQ ID NO: 10886 - RNA, 54 nt, Artificial Sequence
  Description of Artificial Sequence:  Enzymatic Nucleic Acid
auggcagaagaagggccuaccagagaaacacacguugugguacauuaccuggua

SEQ ID NO: 10887 - RNA, 54 nt, Artificial Sequence
  Description of Artificial Sequence:  Enzymatic Nucleic Acid
gugcccacagaaggaaugaccagagaaacacacguugugguacauuaccuggua

SEQ ID NO: 10888 - RNA, 54 nt, Artificial Sequence
  Description of Artificial Sequence:  Enzymatic Nucleic Acid
gggcggggagaagcacgcaccagagaaacacacguugugguacauuaccuggua

SEQ ID NO: 10889 - RNA, 54 nt, Artificial Sequence
  Description of Artificial Sequence:  Enzymatic Nucleic Acid
agucugggagaagggagcaccagagaaacacacguugugguacauuaccuggua

SEQ ID NO: 10890 - RNA, 54 nt, Artificial Sequence
  Description of Artificial Sequence:  Enzymatic Nucleic Acid
gaguuguaagaagggggcaccagagaaacacacguugugguacauuaccuggua

SEQ ID NO: 10891 - RNA, 54 nt, Artificial Sequence
  Description of Artificial Sequence:  Enzymatic Nucleic Acid
caaaaagcagaaggcuccaccagagaaacacacguugugguacauuaccuggua

SEQ ID NO: 10892 - RNA, 54 nt, Artificial Sequence
  Description of Artificial Sequence:  Enzymatic Nucleic Acid
ucacaaaaagaagcuggcaccagagaaacacacguugugguacauuaccuggua

SEQ ID NO: 10893 - RNA, 54 nt, Artificial Sequence
  Description of Artificial Sequence:  Enzymatic Nucleic Acid
gggguuggagaagggaagaccagagaaacacacguugugguacauuaccuggua

SEQ ID NO: 10894 - RNA, 54 nt, Artificial Sequence
  Description of Artificial Sequence:  Enzymatic Nucleic Acid
cucaaucaagaagguccuaccagagaaacacacguugugguacauuaccuggua

SEQ ID NO: 10895 - RNA, 54 nt, Artificial Sequence
  Description of Artificial Sequence:  Enzymatic Nucleic Acid
auugggugagaagugcagaccagagaaacacacguugugguacauuaccuggua

SEQ ID NO: 10896 - RNA, 54 nt, Artificial Sequence
  Description of Artificial Sequence:  Enzymatic Nucleic Acid
ggcugcagagaaggcccaaccagagaaacacacguugugguacauuaccuggua

SEQ ID NO: 10897 - RNA, 54 nt, Artificial Sequence
  Description of Artificial Sequence:  Enzymatic Nucleic Acid
ggguuuugagaagcagggaccagagaaacacacguugugguacauuaccuggua

SEQ ID NO: 10898 - RNA, 54 nt, Artificial Sequence
  Description of Artificial Sequence:  Enzymatic Nucleic Acid
agggucagagaagggaagaccagagaaacacacguugugguacauuaccuggua

SEQ ID NO: 10899 - RNA, 54 nt, Artificial Sequence
  Description of Artificial Sequence:  Enzymatic Nucleic Acid
guagaaggagaagagcugaccagagaaacacacguugugguacauuaccuggua

SEQ ID NO: 10900 - RNA, 54 nt, Artificial Sequence
  Description of Artificial Sequence:  Enzymatic Nucleic Acid
cgcuguccagaagcuccuaccagagaaacacacguugugguacauuaccuggua

SEQ ID NO: 10901 - RNA, 54 nt, Artificial Sequence
  Description of Artificial Sequence:  Enzymatic Nucleic Acid
cugugcaaagaagaauaaaccagagaaacacacguugugguacauuaccuggua

SEQ ID NO: 10902 - RNA, 54 nt, Artificial Sequence
  Description of Artificial Sequence:  Enzymatic Nucleic Acid
cuccucagagaagcauuuaccagagaaacacacguugugguacauuaccuggua

SEQ ID NO: 10903 - RNA, 54 nt, Artificial Sequence
  Description of Artificial Sequence:  Enzymatic Nucleic Acid
uuuccuccagaagcccucaccagagaaacacacguugugguacauuaccuggua

SEQ ID NO: 10904 - RNA, 54 nt, Artificial Sequence
  Description of Artificial Sequence:  Enzymatic Nucleic Acid
gguauagaagaagggucuaccagagaaacacacguugugguacauuaccuggua

SEQ ID NO: 10905 - RNA, 54 nt, Artificial Sequence
  Description of Artificial Sequence:  Enzymatic Nucleic Acid
ugggucccagaaguguugaccagagaaacacacguugugguacauuaccuggua

SEQ ID NO: 10906 - RNA, 54 nt, Artificial Sequence
  Description of Artificial Sequence:  Enzymatic Nucleic Acid
ugagucccagaaggagaaaccagagaaacacacguugugguacauuaccuggua

SEQ ID NO: 10907 - RNA, 54 nt, Artificial Sequence
  Description of Artificial Sequence:  Enzymatic Nucleic Acid
aguuucaaagaaguugaaaccagagaaacacacguugugguacauuaccuggua

SEQ ID NO: 10908 - RNA, 54 nt, Artificial Sequence
  Description of Artificial Sequence:  Enzymatic Nucleic Acid
uagcaucaagaagagccaaccagagaaacacacguugugguacauuaccuggua

SEQ ID NO: 10909 - RNA, 54 nt, Artificial Sequence
  Description of Artificial Sequence:  Enzymatic Nucleic Acid
ccccaagaagaagcaaucaccagagaaacacacguugugguacauuaccuggua

SEQ ID NO: 10910 - RNA, 54 nt, Artificial Sequence
  Description of Artificial Sequence:  Enzymatic Nucleic Acid
cacauaagagaagaggcaaccagagaaacacacguugugguacauuaccuggua

SEQ ID NO: 10911 - RNA, 54 nt, Artificial Sequence
  Description of Artificial Sequence:  Enzymatic Nucleic Acid
uccacaaaagaagcugccaccagagaaacacacguugugguacauuaccuggua

SEQ ID NO: 10912 - RNA, 54 nt, Artificial Sequence
  Description of Artificial Sequence:  Enzymatic Nucleic Acid
guggagagagaagucccaaccagagaaacacacguugugguacauuaccuggua

SEQ ID NO: 10913 - RNA, 54 nt, Artificial Sequence
  Description of Artificial Sequence:  Enzymatic Nucleic Acid
aaauugccagaagucacaaccagagaaacacacguugugguacauuaccuggua

SEQ ID NO: 10914 - RNA, 54 nt, Artificial Sequence
  Description of Artificial Sequence:  Enzymatic Nucleic Acid
aagacaugagaagcuaagaccagagaaacacacguugugguacauuaccuggua

SEQ ID NO: 10915 - RNA, 54 nt, Artificial Sequence
  Description of Artificial Sequence:  Enzymatic Nucleic Acid
uuugaaggagaagaguaaaccagagaaacacacguugugguacauuaccuggua

SEQ ID NO: 10916 - RNA, 54 nt, Artificial Sequence
  Description of Artificial Sequence:  Enzymatic Nucleic Acid
uccacccaagaaguuccaaccagagaaacacacguugugguacauuaccuggua

SEQ ID NO: 10917 - RNA, 54 nt, Artificial Sequence
  Description of Artificial Sequence:  Enzymatic Nucleic Acid
acuucuugagaagacaagaccagagaaacacacguugugguacauuaccuggua

SEQ ID NO: 10918 - RNA, 54 nt, Artificial Sequence
  Description of Artificial Sequence:  Enzymatic Nucleic Acid
aacauaaaagaaguugccaccagagaaacacacguugugguacauuaccuggua

SEQ ID NO: 10919 - RNA, 54 nt, Artificial Sequence
  Description of Artificial Sequence:  Enzymatic Nucleic Acid
uggaaggaagaagaacauaccagagaaacacacguugugguacauuaccuggua

SEQ ID NO: 10920 - RNA, 54 nt, Artificial Sequence
  Description of Artificial Sequence:  Enzymatic Nucleic Acid
cccauacaagaagcuaaaaccagagaaacacacguugugguacauuaccuggua

SEQ ID NO: 10921 - RNA, 54 nt, Artificial Sequence
  Description of Artificial Sequence:  Enzymatic Nucleic Acid
uuuucaugagaaggaauuaccagagaaacacacguugugguacauuaccuggua

SEQ ID NO: 10922 - RNA, 54 nt, Artificial Sequence
  Description of Artificial Sequence:  Enzymatic Nucleic Acid
gacauucaagaagaaaugaccagagaaacacacguugugguacauuaccuggua

SEQ ID NO: 10923 - RNA, 54 nt, Artificial Sequence
  Description of Artificial Sequence:  Enzymatic Nucleic Acid
aauauauaagaagacauuaccagagaaacacacguugugguacauuaccuggua

SEQ ID NO: 10924 - RNA, 54 nt, Artificial Sequence
  Description of Artificial Sequence:  Enzymatic Nucleic Acid
auacaaagagaagagaauaccagagaaacacacguugugguacauuaccuggua

SEQ ID NO: 10925 - RNA, 38 nt, Artificial Sequence
  Description of Artificial Sequence:  Enzymatic Nucleic Acid
cacagggccugaugaggccguuaggccgaaacggccag

SEQ ID NO: 10926 - RNA, 38 nt, Artificial Sequence
  Description of Artificial Sequence:  Enzymatic Nucleic Acid
uccacgcacugaugaggccguuaggccgaaagccacag

SEQ ID NO: 10927 - RNA, 38 nt, Artificial Sequence
  Description of Artificial Sequence:  Enzymatic Nucleic Acid
aacccacacugaugaggccguuaggccgaaaggcggcc

SEQ ID NO: 10928 - RNA, 38 nt, Artificial Sequence
  Description of Artificial Sequence:  Enzymatic Nucleic Acid
acuaggcacugaugaggccguuaggccgaaacccacag

SEQ ID NO: 10929 - RNA, 38 nt, Artificial Sequence
  Description of Artificial Sequence:  Enzymatic Nucleic Acid
cacuaggccugaugaggccguuaggccgaaaacccaca

SEQ ID NO: 10930 - RNA, 38 nt, Artificial Sequence
  Description of Artificial Sequence:  Enzymatic Nucleic Acid
agaaacaccugaugaggccguuaggccgaaaggcaaac

SEQ ID NO: 10931 - RNA, 38 nt, Artificial Sequence
  Description of Artificial Sequence:  Enzymatic Nucleic Acid
ucaagagacugaugaggccguuaggccgaaacacuagg

SEQ ID NO: 10932 - RNA, 38 nt, Artificial Sequence
  Description of Artificial Sequence:  Enzymatic Nucleic Acid
aucaagagcugaugaggccguuaggccgaaaacacuag

SEQ ID NO: 10933 - RNA, 38 nt, Artificial Sequence
  Description of Artificial Sequence:  Enzymatic Nucleic Acid
gaucaagacugaugaggccguuaggccgaaaaacacua

SEQ ID NO: 10934 - RNA, 38 nt, Artificial Sequence
  Description of Artificial Sequence:  Enzymatic Nucleic Acid
cagaucaacugaugaggccguuaggccgaaagaaacac

SEQ ID NO: 10935 - RNA, 38 nt, Artificial Sequence
  Description of Artificial Sequence:  Enzymatic Nucleic Acid
ggcagauccugaugaggccguuaggccgaaagagaaac

SEQ ID NO: 10936 - RNA, 38 nt, Artificial Sequence
  Description of Artificial Sequence:  Enzymatic Nucleic Acid
ccugggcacugaugaggccguuaggccgaaaucaagag

SEQ ID NO: 10937 - RNA, 38 nt, Artificial Sequence
  Description of Artificial Sequence:  Enzymatic Nucleic Acid
uguaugcucugaugaggccguuaggccgaaagccuggg

SEQ ID NO: 10938 - RNA, 38 nt, Artificial Sequence
  Description of Artificial Sequence:  Enzymatic Nucleic Acid
ucuuuuugcugaugaggccguuaggccgaaaugcugag

SEQ ID NO: 10939 - RNA, 38 nt, Artificial Sequence
  Description of Artificial Sequence:  Enzymatic Nucleic Acid
auuguaagcugaugaggccguuaggccgaaaugucuuu

SEQ ID NO: 10940 - RNA, 38 nt, Artificial Sequence
  Description of Artificial Sequence:  Enzymatic Nucleic Acid
uuaauugucugaugaggccguuaggccgaaaguauguc

SEQ ID NO: 10941 - RNA, 38 nt, Artificial Sequence
  Description of Artificial Sequence:  Enzymatic Nucleic Acid
cuuaauugcugaugaggccguuaggccgaaaaguaugu

SEQ ID NO: 10942 - RNA, 38 nt, Artificial Sequence
  Description of Artificial Sequence:  Enzymatic Nucleic Acid
uuagccuucugaugaggccguuaggccgaaauuguaag

SEQ ID NO: 10943 - RNA, 38 nt, Artificial Sequence
  Description of Artificial Sequence:  Enzymatic Nucleic Acid
auuagccucugaugaggccguuaggccgaaaauuguaa

SEQ ID NO: 10944 - RNA, 38 nt, Artificial Sequence
  Description of Artificial Sequence:  Enzymatic Nucleic Acid
aguuguaucugaugaggccguuaggccgaaagccuuaa

SEQ ID NO: 10945 - RNA, 38 nt, Artificial Sequence
  Description of Artificial Sequence:  Enzymatic Nucleic Acid
aagaguugcugaugaggccguuaggccgaaauuagccu

SEQ ID NO: 10946 - RNA, 38 nt, Artificial Sequence
  Description of Artificial Sequence:  Enzymatic Nucleic Acid
aauuugaacugaugaggccguuaggccgaaaguuguau

SEQ ID NO: 10947 - RNA, 38 nt, Artificial Sequence
  Description of Artificial Sequence:  Enzymatic Nucleic Acid
guaauuugcugaugaggccguuaggccgaaagaguugu

SEQ ID NO: 10948 - RNA, 38 nt, Artificial Sequence
  Description of Artificial Sequence:  Enzymatic Nucleic Acid
aguaauuucugaugaggccguuaggccgaaaagaguug

SEQ ID NO: 10949 - RNA, 38 nt, Artificial Sequence
  Description of Artificial Sequence:  Enzymatic Nucleic Acid
cugcaagucugaugaggccguuaggccgaaauuugaag

SEQ ID NO: 10950 - RNA, 38 nt, Artificial Sequence
  Description of Artificial Sequence:  Enzymatic Nucleic Acid
ccugcaagcugaugaggccguuaggccgaaaauuugaa

SEQ ID NO: 10951 - RNA, 38 nt, Artificial Sequence
  Description of Artificial Sequence:  Enzymatic Nucleic Acid
uccccugccugaugaggccguuaggccgaaaguaauuu

SEQ ID NO: 10952 - RNA, 38 nt, Artificial Sequence
  Description of Artificial Sequence:  Enzymatic Nucleic Acid
gccagucccugaugaggccguuaggccgaaagucccuc

SEQ ID NO: 10953 - RNA, 38 nt, Artificial Sequence
  Description of Artificial Sequence:  Enzymatic Nucleic Acid
uugggccacugaugaggccguuaggccgaaagccaguc

SEQ ID NO: 10954 - RNA, 38 nt, Artificial Sequence
  Description of Artificial Sequence:  Enzymatic Nucleic Acid
auugggcccugaugaggccguuaggccgaaaagccagu

SEQ ID NO: 10955 - RNA, 38 nt, Artificial Sequence
  Description of Artificial Sequence:  Enzymatic Nucleic Acid
acucugaucugaugaggccguuaggccgaaauugggcc

SEQ ID NO: 10956 - RNA, 38 nt, Artificial Sequence
  Description of Artificial Sequence:  Enzymatic Nucleic Acid
gccacucucugaugaggccguuaggccgaaauuauugg

SEQ ID NO: 10957 - RNA, 38 nt, Artificial Sequence
  Description of Artificial Sequence:  Enzymatic Nucleic Acid
uuacagaacugaugaggccguuaggccgaaaggccauc

SEQ ID NO: 10958 - RNA, 38 nt, Artificial Sequence
  Description of Artificial Sequence:  Enzymatic Nucleic Acid
ucuuacagcugaugaggccguuaggccgaaagaggcca

SEQ ID NO: 10959 - RNA, 38 nt, Artificial Sequence
  Description of Artificial Sequence:  Enzymatic Nucleic Acid
gucuuacacugaugaggccguuaggccgaaaagaggcc

SEQ ID NO: 10960 - RNA, 38 nt, Artificial Sequence
  Description of Artificial Sequence:  Enzymatic Nucleic Acid
gagugucucugaugaggccguuaggccgaaacagaaga

SEQ ID NO: 10961 - RNA, 38 nt, Artificial Sequence
  Description of Artificial Sequence:  Enzymatic Nucleic Acid
ggaauugucugaugaggccguuaggccgaaagugucuu

SEQ ID NO: 10962 - RNA, 38 nt, Artificial Sequence
  Description of Artificial Sequence:  Enzymatic Nucleic Acid
acuuuuggcugaugaggccguuaggccgaaauugugag

SEQ ID NO: 10963 - RNA, 38 nt, Artificial Sequence
  Description of Artificial Sequence:  Enzymatic Nucleic Acid
cacuuuugcugaugaggccguuaggccgaaaauuguga

SEQ ID NO: 10964 - RNA, 38 nt, Artificial Sequence
  Description of Artificial Sequence:  Enzymatic Nucleic Acid
ucauuucccugaugaggccguuaggccgaaaucacuuu

SEQ ID NO: 10965 - RNA, 38 nt, Artificial Sequence
  Description of Artificial Sequence:  Enzymatic Nucleic Acid
agcacuugcugaugaggccguuaggccgaaaggcucca

SEQ ID NO: 10966 - RNA, 38 nt, Artificial Sequence
  Description of Artificial Sequence:  Enzymatic Nucleic Acid
cccgguagcugaugaggccguuaggccgaaagcacuug

SEQ ID NO: 10967 - RNA, 38 nt, Artificial Sequence
  Description of Artificial Sequence:  Enzymatic Nucleic Acid
ucccgguacugaugaggccguuaggccgaaaagcacuu

SEQ ID NO: 10968 - RNA, 38 nt, Artificial Sequence
  Description of Artificial Sequence:  Enzymatic Nucleic Acid
uuucccggcugaugaggccguuaggccgaaagaagcac

SEQ ID NO: 10969 - RNA, 38 nt, Artificial Sequence
  Description of Artificial Sequence:  Enzymatic Nucleic Acid
ccgaggcccugaugaggccguuaggccgaaagucaguu

SEQ ID NO: 10970 - RNA, 38 nt, Artificial Sequence
  Description of Artificial Sequence:  Enzymatic Nucleic Acid
aaaugacccugaugaggccguuaggccgaaaggccaag

SEQ ID NO: 10971 - RNA, 38 nt, Artificial Sequence
  Description of Artificial Sequence:  Enzymatic Nucleic Acid
acauaaaucugaugaggccguuaggccgaaaccgaggc

SEQ ID NO: 10972 - RNA, 38 nt, Artificial Sequence
  Description of Artificial Sequence:  Enzymatic Nucleic Acid
uagacauacugaugaggccguuaggccgaaaugaccga

SEQ ID NO: 10973 - RNA, 38 nt, Artificial Sequence
  Description of Artificial Sequence:  Enzymatic Nucleic Acid
auagacaucugaugaggccguuaggccgaaaaugaccg

SEQ ID NO: 10974 - RNA, 38 nt, Artificial Sequence
  Description of Artificial Sequence:  Enzymatic Nucleic Acid
cauagacacugaugaggccguuaggccgaaaaaugacc

SEQ ID NO: 10975 - RNA, 38 nt, Artificial Sequence
  Description of Artificial Sequence:  Enzymatic Nucleic Acid
ugaacauacugaugaggccguuaggccgaaacauaaau

SEQ ID NO: 10976 - RNA, 38 nt, Artificial Sequence
  Description of Artificial Sequence:  Enzymatic Nucleic Acid
cuugaacacugaugaggccguuaggccgaaagacauaa

SEQ ID NO: 10977 - RNA, 38 nt, Artificial Sequence
  Description of Artificial Sequence:  Enzymatic Nucleic Acid
uaaucuugcugaugaggccguuaggccgaaacauagac

SEQ ID NO: 10978 - RNA, 38 nt, Artificial Sequence
  Description of Artificial Sequence:  Enzymatic Nucleic Acid
guaaucuucugaugaggccguuaggccgaaaacauaga

SEQ ID NO: 10979 - RNA, 38 nt, Artificial Sequence
  Description of Artificial Sequence:  Enzymatic Nucleic Acid
agaucugucugaugaggccguuaggccgaaaucuugaa

SEQ ID NO: 10980 - RNA, 38 nt, Artificial Sequence
  Description of Artificial Sequence:  Enzymatic Nucleic Acid
gagaucugcugaugaggccguuaggccgaaaaucuuga

SEQ ID NO: 10981 - RNA, 38 nt, Artificial Sequence
  Description of Artificial Sequence:  Enzymatic Nucleic Acid
uaaauggacugaugaggccguuaggccgaaaucuguaa

SEQ ID NO: 10982 - RNA, 38 nt, Artificial Sequence
  Description of Artificial Sequence:  Enzymatic Nucleic Acid
aauaaaugcugaugaggccguuaggccgaaagaucugu

SEQ ID NO: 10983 - RNA, 38 nt, Artificial Sequence
  Description of Artificial Sequence:  Enzymatic Nucleic Acid
aagcaauacugaugaggccguuaggccgaaauggagau

SEQ ID NO: 10984 - RNA, 38 nt, Artificial Sequence
  Description of Artificial Sequence:  Enzymatic Nucleic Acid
gaagcaaucugaugaggccguuaggccgaaaauggaga

SEQ ID NO: 10985 - RNA, 38 nt, Artificial Sequence
  Description of Artificial Sequence:  Enzymatic Nucleic Acid
agaagcaacugaugaggccguuaggccgaaaaauggag

SEQ ID NO: 10986 - RNA, 38 nt, Artificial Sequence
  Description of Artificial Sequence:  Enzymatic Nucleic Acid
acagaagccugaugaggccguuaggccgaaauaaaugg

SEQ ID NO: 10987 - RNA, 38 nt, Artificial Sequence
  Description of Artificial Sequence:  Enzymatic Nucleic Acid
acuaacagcugaugaggccguuaggccgaaagcaauaa

SEQ ID NO: 10988 - RNA, 38 nt, Artificial Sequence
  Description of Artificial Sequence:  Enzymatic Nucleic Acid
cacuaacacugaugaggccguuaggccgaaaagcaaua

SEQ ID NO: 10989 - RNA, 38 nt, Artificial Sequence
  Description of Artificial Sequence:  Enzymatic Nucleic Acid
uggucacucugaugaggccguuaggccgaaacagaagc

SEQ ID NO: 10990 - RNA, 38 nt, Artificial Sequence
  Description of Artificial Sequence:  Enzymatic Nucleic Acid
uuggucaccugaugaggccguuaggccgaaaacagaag

SEQ ID NO: 10991 - RNA, 38 nt, Artificial Sequence
  Description of Artificial Sequence:  Enzymatic Nucleic Acid
auguacaccugaugaggccguuaggccgaaacuccaug

SEQ ID NO: 10992 - RNA, 38 nt, Artificial Sequence
  Description of Artificial Sequence:  Enzymatic Nucleic Acid
caguaaugcugaugaggccguuaggccgaaacacgacu

SEQ ID NO: 10993 - RNA, 38 nt, Artificial Sequence
  Description of Artificial Sequence:  Enzymatic Nucleic Acid
uucucagucugaugaggccguuaggccgaaauguacac

SEQ ID NO: 10994 - RNA, 38 nt, Artificial Sequence
  Description of Artificial Sequence:  Enzymatic Nucleic Acid
guucucagcugaugaggccguuaggccgaaaauguaca

SEQ ID NO: 10995 - RNA, 38 nt, Artificial Sequence
  Description of Artificial Sequence:  Enzymatic Nucleic Acid
agacauggcugaugaggccguuaggccgaaaucaccac

SEQ ID NO: 10996 - RNA, 38 nt, Artificial Sequence
  Description of Artificial Sequence:  Enzymatic Nucleic Acid
gagacaugcugaugaggccguuaggccgaaaaucacca

SEQ ID NO: 10997 - RNA, 38 nt, Artificial Sequence
  Description of Artificial Sequence:  Enzymatic Nucleic Acid
ggacccgacugaugaggccguuaggccgaaacauggaa

SEQ ID NO: 10998 - RNA, 38 nt, Artificial Sequence
  Description of Artificial Sequence:  Enzymatic Nucleic Acid
auggaccccugaugaggccguuaggccgaaagacaugg

SEQ ID NO: 10999 - RNA, 38 nt, Artificial Sequence
  Description of Artificial Sequence:  Enzymatic Nucleic Acid
uugaaaugcugaugaggccguuaggccgaaacccgaga

SEQ ID NO: 11000 - RNA, 38 nt, Artificial Sequence
  Description of Artificial Sequence:  Enzymatic Nucleic Acid
agauuugacugaugaggccguuaggccgaaauggaccc

SEQ ID NO: 11001 - RNA, 38 nt, Artificial Sequence
  Description of Artificial Sequence:  Enzymatic Nucleic Acid
gagauuugcugaugaggccguuaggccgaaaauggacc

SEQ ID NO: 11002 - RNA, 38 nt, Artificial Sequence
  Description of Artificial Sequence:  Enzymatic Nucleic Acid
ugagauuucugaugaggccguuaggccgaaaaauggac

SEQ ID NO: 11003 - RNA, 38 nt, Artificial Sequence
  Description of Artificial Sequence:  Enzymatic Nucleic Acid
cacguugacugaugaggccguuaggccgaaauuugaaa

SEQ ID NO: 11004 - RNA, 38 nt, Artificial Sequence
  Description of Artificial Sequence:  Enzymatic Nucleic Acid
gacacguucugaugaggccguuaggccgaaagauuuga

SEQ ID NO: 11005 - RNA, 38 nt, Artificial Sequence
  Description of Artificial Sequence:  Enzymatic Nucleic Acid
cacaaagucugaugaggccguuaggccgaaacacguug

SEQ ID NO: 11006 - RNA, 38 nt, Artificial Sequence
  Description of Artificial Sequence:  Enzymatic Nucleic Acid
cuugcacacugaugaggccguuaggccgaaagugacac

SEQ ID NO: 11007 - RNA, 38 nt, Artificial Sequence
  Description of Artificial Sequence:  Enzymatic Nucleic Acid
ucuugcaccugaugaggccguuaggccgaaaagugaca

SEQ ID NO: 11008 - RNA, 38 nt, Artificial Sequence
  Description of Artificial Sequence:  Enzymatic Nucleic Acid
uuucugggcugaugaggccguuaggccgaaaucuugca

SEQ ID NO: 11009 - RNA, 38 nt, Artificial Sequence
  Description of Artificial Sequence:  Enzymatic Nucleic Acid
caggaacacugaugaggccguuaggccgaaaucucuuu

SEQ ID NO: 11010 - RNA, 38 nt, Artificial Sequence
  Description of Artificial Sequence:  Enzymatic Nucleic Acid
ucaggaaccugaugaggccguuaggccgaaaaucucuu

SEQ ID NO: 11011 - RNA, 38 nt, Artificial Sequence
  Description of Artificial Sequence:  Enzymatic Nucleic Acid
ccaucaggcugaugaggccguuaggccgaaacaaaucu

SEQ ID NO: 11012 - RNA, 38 nt, Artificial Sequence
  Description of Artificial Sequence:  Enzymatic Nucleic Acid
accaucagcugaugaggccguuaggccgaaaacaaauc

SEQ ID NO: 11013 - RNA, 38 nt, Artificial Sequence
  Description of Artificial Sequence:  Enzymatic Nucleic Acid
aauucugucugaugaggccguuaggccgaaaccaucag

SEQ ID NO: 11014 - RNA, 38 nt, Artificial Sequence
  Description of Artificial Sequence:  Enzymatic Nucleic Acid
ucccaggacugaugaggccguuaggccgaaauucuguu

SEQ ID NO: 11015 - RNA, 38 nt, Artificial Sequence
  Description of Artificial Sequence:  Enzymatic Nucleic Acid
gucccaggcugaugaggccguuaggccgaaaauucugu

SEQ ID NO: 11016 - RNA, 38 nt, Artificial Sequence
  Description of Artificial Sequence:  Enzymatic Nucleic Acid
ugucccagcugaugaggccguuaggccgaaaaauucug

SEQ ID NO: 11017 - RNA, 38 nt, Artificial Sequence
  Description of Artificial Sequence:  Enzymatic Nucleic Acid
gaauaguacugaugaggccguuaggccgaaagcccuuc

SEQ ID NO: 11018 - RNA, 38 nt, Artificial Sequence
  Description of Artificial Sequence:  Enzymatic Nucleic Acid
ggaauagucugaugaggccguuaggccgaaaagcccuu

SEQ ID NO: 11019 - RNA, 38 nt, Artificial Sequence
  Description of Artificial Sequence:  Enzymatic Nucleic Acid
gggaauagcugaugaggccguuaggccgaaaaagcccu

SEQ ID NO: 11020 - RNA, 38 nt, Artificial Sequence
  Description of Artificial Sequence:  Enzymatic Nucleic Acid
gcugggaacugaugaggccguuaggccgaaaguaaagc

SEQ ID NO: 11021 - RNA, 38 nt, Artificial Sequence
  Description of Artificial Sequence:  Enzymatic Nucleic Acid
uagcugggcugaugaggccguuaggccgaaauaguaaa

SEQ ID NO: 11022 - RNA, 38 nt, Artificial Sequence
  Description of Artificial Sequence:  Enzymatic Nucleic Acid
guagcuggcugaugaggccguuaggccgaaaauaguaa

SEQ ID NO: 11023 - RNA, 38 nt, Artificial Sequence
  Description of Artificial Sequence:  Enzymatic Nucleic Acid
ugaucaugcugaugaggccguuaggccgaaagcuggga

SEQ ID NO: 11024 - RNA, 38 nt, Artificial Sequence
  Description of Artificial Sequence:  Enzymatic Nucleic Acid
gcauagcucugaugaggccguuaggccgaaaucaugua

SEQ ID NO: 11025 - RNA, 38 nt, Artificial Sequence
  Description of Artificial Sequence:  Enzymatic Nucleic Acid
ugccagcacugaugaggccguuaggccgaaagcugauc

SEQ ID NO: 11026 - RNA, 38 nt, Artificial Sequence
  Description of Artificial Sequence:  Enzymatic Nucleic Acid
ucacagaacugaugaggccguuaggccgaaaccaugcc

SEQ ID NO: 11027 - RNA, 38 nt, Artificial Sequence
  Description of Artificial Sequence:  Enzymatic Nucleic Acid
cuucacagcugaugaggccguuaggccgaaagaccaug

SEQ ID NO: 11028 - RNA, 38 nt, Artificial Sequence
  Description of Artificial Sequence:  Enzymatic Nucleic Acid
gcuucacacugaugaggccguuaggccgaaaagaccau

SEQ ID NO: 11029 - RNA, 38 nt, Artificial Sequence
  Description of Artificial Sequence:  Enzymatic Nucleic Acid
ucaucauucugaugaggccguuaggccgaaauuuuugc

SEQ ID NO: 11030 - RNA, 38 nt, Artificial Sequence
  Description of Artificial Sequence:  Enzymatic Nucleic Acid
uucaucaucugaugaggccguuaggccgaaaauuuuug

SEQ ID NO: 11031 - RNA, 38 nt, Artificial Sequence
  Description of Artificial Sequence:  Enzymatic Nucleic Acid
agacuggucugaugaggccguuaggccgaaacuuucau

SEQ ID NO: 11032 - RNA, 38 nt, Artificial Sequence
  Description of Artificial Sequence:  Enzymatic Nucleic Acid
uagacuggcugaugaggccguuaggccgaaaacuuuca

SEQ ID NO: 11033 - RNA, 38 nt, Artificial Sequence
  Description of Artificial Sequence:  Enzymatic Nucleic Acid
acauaauacugaugaggccguuaggccgaaacugguaa

SEQ ID NO: 11034 - RNA, 38 nt, Artificial Sequence
  Description of Artificial Sequence:  Enzymatic Nucleic Acid
guacauaacugaugaggccguuaggccgaaagacuggu

SEQ ID NO: 11035 - RNA, 38 nt, Artificial Sequence
  Description of Artificial Sequence:  Enzymatic Nucleic Acid
auguacaucugaugaggccguuaggccgaaauagacug

SEQ ID NO: 11036 - RNA, 38 nt, Artificial Sequence
  Description of Artificial Sequence:  Enzymatic Nucleic Acid
uauguacacugaugaggccguuaggccgaaaauagacu

SEQ ID NO: 11037 - RNA, 38 nt, Artificial Sequence
  Description of Artificial Sequence:  Enzymatic Nucleic Acid
caacuaugcugaugaggccguuaggccgaaacauaaua

SEQ ID NO: 11038 - RNA, 38 nt, Artificial Sequence
  Description of Artificial Sequence:  Enzymatic Nucleic Acid
acgacaaccugaugaggccguuaggccgaaauguacau

SEQ ID NO: 11039 - RNA, 38 nt, Artificial Sequence
  Description of Artificial Sequence:  Enzymatic Nucleic Acid
acaacgaccugaugaggccguuaggccgaaacuaugua

SEQ ID NO: 11040 - RNA, 38 nt, Artificial Sequence
  Description of Artificial Sequence:  Enzymatic Nucleic Acid
ccuacaaccugaugaggccguuaggccgaaacaacuau

SEQ ID NO: 11041 - RNA, 38 nt, Artificial Sequence
  Description of Artificial Sequence:  Enzymatic Nucleic Acid
uacccuaccugaugaggccguuaggccgaaacgacaac

SEQ ID NO: 11042 - RNA, 38 nt, Artificial Sequence
  Description of Artificial Sequence:  Enzymatic Nucleic Acid
cuauaccccugaugaggccguuaggccgaaacaacgac

SEQ ID NO: 11043 - RNA, 38 nt, Artificial Sequence
  Description of Artificial Sequence:  Enzymatic Nucleic Acid
aaauccuacugaugaggccguuaggccgaaacccuaca

SEQ ID NO: 11044 - RNA, 38 nt, Artificial Sequence
  Description of Artificial Sequence:  Enzymatic Nucleic Acid
auaaaucccugaugaggccguuaggccgaaauacccua

SEQ ID NO: 11045 - RNA, 38 nt, Artificial Sequence
  Description of Artificial Sequence:  Enzymatic Nucleic Acid
acaucauacugaugaggccguuaggccgaaauccuaua

SEQ ID NO: 11046 - RNA, 38 nt, Artificial Sequence
  Description of Artificial Sequence:  Enzymatic Nucleic Acid
cacaucaucugaugaggccguuaggccgaaaauccuau

SEQ ID NO: 11047 - RNA, 38 nt, Artificial Sequence
  Description of Artificial Sequence:  Enzymatic Nucleic Acid
ccacaucacugaugaggccguuaggccgaaaaauccua

SEQ ID NO: 11048 - RNA, 38 nt, Artificial Sequence
  Description of Artificial Sequence:  Enzymatic Nucleic Acid
ggacucagcugaugaggccguuaggccgaaaccacauc

SEQ ID NO: 11049 - RNA, 38 nt, Artificial Sequence
  Description of Artificial Sequence:  Enzymatic Nucleic Acid
cggacucacugaugaggccguuaggccgaaaaccacau

SEQ ID NO: 11050 - RNA, 38 nt, Artificial Sequence
  Description of Artificial Sequence:  Enzymatic Nucleic Acid
augagacgcugaugaggccguuaggccgaaacucagaa

SEQ ID NO: 11051 - RNA, 38 nt, Artificial Sequence
  Description of Artificial Sequence:  Enzymatic Nucleic Acid
uuccaugacugaugaggccguuaggccgaaacggacuc

SEQ ID NO: 11052 - RNA, 38 nt, Artificial Sequence
  Description of Artificial Sequence:  Enzymatic Nucleic Acid
aauuccaucugaugaggccguuaggccgaaagacggac

SEQ ID NO: 11053 - RNA, 38 nt, Artificial Sequence
  Description of Artificial Sequence:  Enzymatic Nucleic Acid
gauaguuccugaugaggccguuaggccgaaauuccaug

SEQ ID NO: 11054 - RNA, 38 nt, Artificial Sequence
  Description of Artificial Sequence:  Enzymatic Nucleic Acid
ccaacagacugaugaggccguuaggccgaaaguucaau

SEQ ID NO: 11055 - RNA, 38 nt, Artificial Sequence
  Description of Artificial Sequence:  Enzymatic Nucleic Acid
cuccaacacugaugaggccguuaggccgaaauaguuca

SEQ ID NO: 11056 - RNA, 38 nt, Artificial Sequence
  Description of Artificial Sequence:  Enzymatic Nucleic Acid
uuuucucccugaugaggccguuaggccgaaacagauag

SEQ ID NO: 11057 - RNA, 38 nt, Artificial Sequence
  Description of Artificial Sequence:  Enzymatic Nucleic Acid
uuuaagaccugaugaggccguuaggccgaaagcuuuuc

SEQ ID NO: 11058 - RNA, 38 nt, Artificial Sequence
  Description of Artificial Sequence:  Enzymatic Nucleic Acid
caauuuaacugaugaggccguuaggccgaaacaagcuu

SEQ ID NO: 11059 - RNA, 38 nt, Artificial Sequence
  Description of Artificial Sequence:  Enzymatic Nucleic Acid
uacaauuucugaugaggccguuaggccgaaagacaagc

SEQ ID NO: 11060 - RNA, 38 nt, Artificial Sequence
  Description of Artificial Sequence:  Enzymatic Nucleic Acid
guacaauucugaugaggccguuaggccgaaaagacaag

SEQ ID NO: 11061 - RNA, 38 nt, Artificial Sequence
  Description of Artificial Sequence:  Enzymatic Nucleic Acid
ugcuguaccugaugaggccguuaggccgaaauuuaaga

SEQ ID NO: 11062 - RNA, 38 nt, Artificial Sequence
  Description of Artificial Sequence:  Enzymatic Nucleic Acid
ucuugcugcugaugaggccguuaggccgaaacaauuua

SEQ ID NO: 11063 - RNA, 38 nt, Artificial Sequence
  Description of Artificial Sequence:  Enzymatic Nucleic Acid
cccacauucugaugaggccguuaggccgaaaguucagu

SEQ ID NO: 11064 - RNA, 38 nt, Artificial Sequence
  Description of Artificial Sequence:  Enzymatic Nucleic Acid
uugaaguccugaugaggccguuaggccgaaauccccac

SEQ ID NO: 11065 - RNA, 38 nt, Artificial Sequence
  Description of Artificial Sequence:  Enzymatic Nucleic Acid
cccaguugcugaugaggccguuaggccgaaagucaauc

SEQ ID NO: 11066 - RNA, 38 nt, Artificial Sequence
  Description of Artificial Sequence:  Enzymatic Nucleic Acid
ucccaguucugaugaggccguuaggccgaaaagucaau

SEQ ID NO: 11067 - RNA, 38 nt, Artificial Sequence
  Description of Artificial Sequence:  Enzymatic Nucleic Acid
aagaagggcugaugaggccguuaggccgaaauucccag

SEQ ID NO: 11068 - RNA, 38 nt, Artificial Sequence
  Description of Artificial Sequence:  Enzymatic Nucleic Acid
cuucgaagcugaugaggccguuaggccgaaaggguauu

SEQ ID NO: 11069 - RNA, 38 nt, Artificial Sequence
  Description of Artificial Sequence:  Enzymatic Nucleic Acid
gcuucgaacugaugaggccguuaggccgaaaaggguau

SEQ ID NO: 11070 - RNA, 38 nt, Artificial Sequence
  Description of Artificial Sequence:  Enzymatic Nucleic Acid
augcuucgcugaugaggccguuaggccgaaagaagggu

SEQ ID NO: 11071 - RNA, 38 nt, Artificial Sequence
  Description of Artificial Sequence:  Enzymatic Nucleic Acid
gaugcuuccugaugaggccguuaggccgaaaagaaggg

SEQ ID NO: 11072 - RNA, 38 nt, Artificial Sequence
  Description of Artificial Sequence:  Enzymatic Nucleic Acid
cuuaugcucugaugaggccguuaggccgaaaugcuucg

SEQ ID NO: 11073 - RNA, 38 nt, Artificial Sequence
  Description of Artificial Sequence:  Enzymatic Nucleic Acid
aaguuucucugaugaggccguuaggccgaaaugcugau

SEQ ID NO: 11074 - RNA, 38 nt, Artificial Sequence
  Description of Artificial Sequence:  Enzymatic Nucleic Acid
cgguuuaccugaugaggccguuaggccgaaaguuucuu

SEQ ID NO: 11075 - RNA, 38 nt, Artificial Sequence
  Description of Artificial Sequence:  Enzymatic Nucleic Acid
ucucgguucugaugaggccguuaggccgaaacaaguuu

SEQ ID NO: 11076 - RNA, 38 nt, Artificial Sequence
  Description of Artificial Sequence:  Enzymatic Nucleic Acid
uggguuuucugaugaggccguuaggccgaaaggucucg

SEQ ID NO: 11077 - RNA, 38 nt, Artificial Sequence
  Description of Artificial Sequence:  Enzymatic Nucleic Acid
cacucccacugaugaggccguuaggccgaaacuggguu

SEQ ID NO: 11078 - RNA, 38 nt, Artificial Sequence
  Description of Artificial Sequence:  Enzymatic Nucleic Acid
ugcucaaacugaugaggccguuaggccgaaauuucuuc

SEQ ID NO: 11079 - RNA, 38 nt, Artificial Sequence
  Description of Artificial Sequence:  Enzymatic Nucleic Acid
gugcucaacugaugaggccguuaggccgaaaauuucuu

SEQ ID NO: 11080 - RNA, 38 nt, Artificial Sequence
  Description of Artificial Sequence:  Enzymatic Nucleic Acid
ggugcucacugaugaggccguuaggccgaaaaauuucu

SEQ ID NO: 11081 - RNA, 38 nt, Artificial Sequence
  Description of Artificial Sequence:  Enzymatic Nucleic Acid
aggugcuccugaugaggccguuaggccgaaaaaauuuc

SEQ ID NO: 11082 - RNA, 38 nt, Artificial Sequence
  Description of Artificial Sequence:  Enzymatic Nucleic Acid
cuauaguucugaugaggccguuaggccgaaaggugcuc

SEQ ID NO: 11083 - RNA, 38 nt, Artificial Sequence
  Description of Artificial Sequence:  Enzymatic Nucleic Acid
ucuauagucugaugaggccguuaggccgaaaaggugcu

SEQ ID NO: 11084 - RNA, 38 nt, Artificial Sequence
  Description of Artificial Sequence:  Enzymatic Nucleic Acid
accaucuacugaugaggccguuaggccgaaaguuaagg

SEQ ID NO: 11085 - RNA, 38 nt, Artificial Sequence
  Description of Artificial Sequence:  Enzymatic Nucleic Acid
acaccauccugaugaggccguuaggccgaaauaguuaa

SEQ ID NO: 11086 - RNA, 38 nt, Artificial Sequence
  Description of Artificial Sequence:  Enzymatic Nucleic Acid
cuccgggucugaugaggccguuaggccgaaacaccauc

SEQ ID NO: 11087 - RNA, 38 nt, Artificial Sequence
  Description of Artificial Sequence:  Enzymatic Nucleic Acid
agguguaccugaugaggccguuaggccgaaauccuugg

SEQ ID NO: 11088 - RNA, 38 nt, Artificial Sequence
  Description of Artificial Sequence:  Enzymatic Nucleic Acid
cacaggugcugaugaggccguuaggccgaaacaauccu

SEQ ID NO: 11089 - RNA, 38 nt, Artificial Sequence
  Description of Artificial Sequence:  Enzymatic Nucleic Acid
gcccacugcugaugaggccguuaggccgaaaugcugca

SEQ ID NO: 11090 - RNA, 38 nt, Artificial Sequence
  Description of Artificial Sequence:  Enzymatic Nucleic Acid
cccugacacugaugaggccguuaggccgaaaugugcug

SEQ ID NO: 11091 - RNA, 38 nt, Artificial Sequence
  Description of Artificial Sequence:  Enzymatic Nucleic Acid
acccugaccugaugaggccguuaggccgaaaaugugcu

SEQ ID NO: 11092 - RNA, 38 nt, Artificial Sequence
  Description of Artificial Sequence:  Enzymatic Nucleic Acid
uggacccucugaugaggccguuaggccgaaacaaaugu

SEQ ID NO: 11093 - RNA, 38 nt, Artificial Sequence
  Description of Artificial Sequence:  Enzymatic Nucleic Acid
uuuucaugcugaugaggccguuaggccgaaacccugac

SEQ ID NO: 11094 - RNA, 38 nt, Artificial Sequence
  Description of Artificial Sequence:  Enzymatic Nucleic Acid
agcaacaacugaugaggccguuaggccgaaagguuuuu

SEQ ID NO: 11095 - RNA, 38 nt, Artificial Sequence
  Description of Artificial Sequence:  Enzymatic Nucleic Acid
aagcaacacugaugaggccguuaggccgaaaagguuuu

SEQ ID NO: 11096 - RNA, 38 nt, Artificial Sequence
  Description of Artificial Sequence:  Enzymatic Nucleic Acid
aaagcaaccugaugaggccguuaggccgaaaaagguuu

SEQ ID NO: 11097 - RNA, 38 nt, Artificial Sequence
  Description of Artificial Sequence:  Enzymatic Nucleic Acid
ccaaaagccugaugaggccguuaggccgaaacaaaagg

SEQ ID NO: 11098 - RNA, 38 nt, Artificial Sequence
  Description of Artificial Sequence:  Enzymatic Nucleic Acid
acuuccaacugaugaggccguuaggccgaaagcaacaa

SEQ ID NO: 11099 - RNA, 38 nt, Artificial Sequence
  Description of Artificial Sequence:  Enzymatic Nucleic Acid
cacuuccacugaugaggccguuaggccgaaaagcaaca

SEQ ID NO: 11100 - RNA, 38 nt, Artificial Sequence
  Description of Artificial Sequence:  Enzymatic Nucleic Acid
ccacuucccugaugaggccguuaggccgaaaaagcaac

SEQ ID NO: 11101 - RNA, 38 nt, Artificial Sequence
  Description of Artificial Sequence:  Enzymatic Nucleic Acid
ccaccagacugaugaggccguuaggccgaaauuccaug

SEQ ID NO: 11102 - RNA, 38 nt, Artificial Sequence
  Description of Artificial Sequence:  Enzymatic Nucleic Acid
uuccaccacugaugaggccguuaggccgaaagauucca

SEQ ID NO: 11103 - RNA, 38 nt, Artificial Sequence
  Description of Artificial Sequence:  Enzymatic Nucleic Acid
gggauucucugaugaggccguuaggccgaaacacgcuc

SEQ ID NO: 11104 - RNA, 38 nt, Artificial Sequence
  Description of Artificial Sequence:  Enzymatic Nucleic Acid
uucgcaggcugaugaggccguuaggccgaaauucugac

SEQ ID NO: 11105 - RNA, 38 nt, Artificial Sequence
  Description of Artificial Sequence:  Enzymatic Nucleic Acid
aaccaaggcugaugaggccguuaggccgaaacuucgca

SEQ ID NO: 11106 - RNA, 38 nt, Artificial Sequence
  Description of Artificial Sequence:  Enzymatic Nucleic Acid
ggguaacccugaugaggccguuaggccgaaagguacuu

SEQ ID NO: 11107 - RNA, 38 nt, Artificial Sequence
  Description of Artificial Sequence:  Enzymatic Nucleic Acid
gggugggucugaugaggccguuaggccgaaaccaaggu

SEQ ID NO: 11108 - RNA, 38 nt, Artificial Sequence
  Description of Artificial Sequence:  Enzymatic Nucleic Acid
ggggugggcugaugaggccguuaggccgaaaaccaagg

SEQ ID NO: 11109 - RNA, 38 nt, Artificial Sequence
  Description of Artificial Sequence:  Enzymatic Nucleic Acid
uaccauuucugaugaggccguuaggccgaaauuucugg

SEQ ID NO: 11110 - RNA, 38 nt, Artificial Sequence
  Description of Artificial Sequence:  Enzymatic Nucleic Acid
cauuuuuacugaugaggccguuaggccgaaaccauuuu

SEQ ID NO: 11111 - RNA, 38 nt, Artificial Sequence
  Description of Artificial Sequence:  Enzymatic Nucleic Acid
uccauuuucugaugaggccguuaggccgaaauaccauu

SEQ ID NO: 11112 - RNA, 38 nt, Artificial Sequence
  Description of Artificial Sequence:  Enzymatic Nucleic Acid
ucaaggggcugaugaggccguuaggccgaaauuccauu

SEQ ID NO: 11113 - RNA, 38 nt, Artificial Sequence
  Description of Artificial Sequence:  Enzymatic Nucleic Acid
uuggacuccugaugaggccguuaggccgaaagggguau

SEQ ID NO: 11114 - RNA, 38 nt, Artificial Sequence
  Description of Artificial Sequence:  Enzymatic Nucleic Acid
ugugauugcugaugaggccguuaggccgaaacucaagg

SEQ ID NO: 11115 - RNA, 38 nt, Artificial Sequence
  Description of Artificial Sequence:  Enzymatic Nucleic Acid
aauugugucugaugaggccguuaggccgaaauuggacu

SEQ ID NO: 11116 - RNA, 38 nt, Artificial Sequence
  Description of Artificial Sequence:  Enzymatic Nucleic Acid
cccgcuuucugaugaggccguuaggccgaaauugugug

SEQ ID NO: 11117 - RNA, 38 nt, Artificial Sequence
  Description of Artificial Sequence:  Enzymatic Nucleic Acid
ccccgcuucugaugaggccguuaggccgaaaauugugu

SEQ ID NO: 11118 - RNA, 38 nt, Artificial Sequence
  Description of Artificial Sequence:  Enzymatic Nucleic Acid
aucgucagcugaugaggccguuaggccgaaacaugccc

SEQ ID NO: 11119 - RNA, 38 nt, Artificial Sequence
  Description of Artificial Sequence:  Enzymatic Nucleic Acid
acuuccaucugaugaggccguuaggccgaaaucgucag

SEQ ID NO: 11120 - RNA, 38 nt, Artificial Sequence
  Description of Artificial Sequence:  Enzymatic Nucleic Acid
cacuuccacugaugaggccguuaggccgaaaaucguca

SEQ ID NO: 11121 - RNA, 38 nt, Artificial Sequence
  Description of Artificial Sequence:  Enzymatic Nucleic Acid
gacagugucugaugaggccguuaggccgaaauuuccug

SEQ ID NO: 11122 - RNA, 38 nt, Artificial Sequence
  Description of Artificial Sequence:  Enzymatic Nucleic Acid
ugacagugcugaugaggccguuaggccgaaaauuuccu

SEQ ID NO: 11123 - RNA, 38 nt, Artificial Sequence
  Description of Artificial Sequence:  Enzymatic Nucleic Acid
guaaggaucugaugaggccguuaggccgaaacagugua

SEQ ID NO: 11124 - RNA, 38 nt, Artificial Sequence
  Description of Artificial Sequence:  Enzymatic Nucleic Acid
uugguaagcugaugaggccguuaggccgaaaugacagu

SEQ ID NO: 11125 - RNA, 38 nt, Artificial Sequence
  Description of Artificial Sequence:  Enzymatic Nucleic Acid
ggauuggucugaugaggccguuaggccgaaaggaugac

SEQ ID NO: 11126 - RNA, 38 nt, Artificial Sequence
  Description of Artificial Sequence:  Enzymatic Nucleic Acid
gggauuggcugaugaggccguuaggccgaaaaggauga

SEQ ID NO: 11127 - RNA, 38 nt, Artificial Sequence
  Description of Artificial Sequence:  Enzymatic Nucleic Acid
ugaaauggcugaugaggccguuaggccgaaauugguaa

SEQ ID NO: 11128 - RNA, 38 nt, Artificial Sequence
  Description of Artificial Sequence:  Enzymatic Nucleic Acid
uccuuugacugaugaggccguuaggccgaaaugggauu

SEQ ID NO: 11129 - RNA, 38 nt, Artificial Sequence
  Description of Artificial Sequence:  Enzymatic Nucleic Acid
cuccuuugcugaugaggccguuaggccgaaaaugggau

SEQ ID NO: 11130 - RNA, 38 nt, Artificial Sequence
  Description of Artificial Sequence:  Enzymatic Nucleic Acid
ucuccuuucugaugaggccguuaggccgaaaaauggga

SEQ ID NO: 11131 - RNA, 38 nt, Artificial Sequence
  Description of Artificial Sequence:  Enzymatic Nucleic Acid
accagagacugaugaggccguuaggccgaaaccacaug

SEQ ID NO: 11132 - RNA, 38 nt, Artificial Sequence
  Description of Artificial Sequence:  Enzymatic Nucleic Acid
caaccagacugaugaggccguuaggccgaaagaccaca

SEQ ID NO: 11133 - RNA, 38 nt, Artificial Sequence
  Description of Artificial Sequence:  Enzymatic Nucleic Acid
cacaaccacugaugaggccguuaggccgaaagagacca

SEQ ID NO: 11134 - RNA, 38 nt, Artificial Sequence
  Description of Artificial Sequence:  Enzymatic Nucleic Acid
acauacaccugaugaggccguuaggccgaaaccagaga

SEQ ID NO: 11135 - RNA, 38 nt, Artificial Sequence
  Description of Artificial Sequence:  Enzymatic Nucleic Acid
gugggacacugaugaggccguuaggccgaaacacaacc

SEQ ID NO: 11136 - RNA, 38 nt, Artificial Sequence
  Description of Artificial Sequence:  Enzymatic Nucleic Acid
ugggguggcugaugaggccguuaggccgaaacauacac

SEQ ID NO: 11137 - RNA, 38 nt, Artificial Sequence
  Description of Artificial Sequence:  Enzymatic Nucleic Acid
uucucacccugaugaggccguuaggccgaaaucugggg

SEQ ID NO: 11138 - RNA, 38 nt, Artificial Sequence
  Description of Artificial Sequence:  Enzymatic Nucleic Acid
agauuagacugaugaggccguuaggccgaaauuucuca

SEQ ID NO: 11139 - RNA, 38 nt, Artificial Sequence
  Description of Artificial Sequence:  Enzymatic Nucleic Acid
agagauuacugaugaggccguuaggccgaaagauuucu

SEQ ID NO: 11140 - RNA, 38 nt, Artificial Sequence
  Description of Artificial Sequence:  Enzymatic Nucleic Acid
ggagagaucugaugaggccguuaggccgaaagagauuu

SEQ ID NO: 11141 - RNA, 38 nt, Artificial Sequence
  Description of Artificial Sequence:  Enzymatic Nucleic Acid
acaggagacugaugaggccguuaggccgaaauuagaga

SEQ ID NO: 11142 - RNA, 38 nt, Artificial Sequence
  Description of Artificial Sequence:  Enzymatic Nucleic Acid
ccacaggacugaugaggccguuaggccgaaagauuaga

SEQ ID NO: 11143 - RNA, 38 nt, Artificial Sequence
  Description of Artificial Sequence:  Enzymatic Nucleic Acid
auccacagcugaugaggccguuaggccgaaagagauua

SEQ ID NO: 11144 - RNA, 38 nt, Artificial Sequence
  Description of Artificial Sequence:  Enzymatic Nucleic Acid
cugguaggcugaugaggccguuaggccgaaauccacag

SEQ ID NO: 11145 - RNA, 38 nt, Artificial Sequence
  Description of Artificial Sequence:  Enzymatic Nucleic Acid
acugguagcugaugaggccguuaggccgaaaauccaca

SEQ ID NO: 11146 - RNA, 38 nt, Artificial Sequence
  Description of Artificial Sequence:  Enzymatic Nucleic Acid
cguacuggcugaugaggccguuaggccgaaaggaaucc

SEQ ID NO: 11147 - RNA, 38 nt, Artificial Sequence
  Description of Artificial Sequence:  Enzymatic Nucleic Acid
uggugccgcugaugaggccguuaggccgaaacugguag

SEQ ID NO: 11148 - RNA, 38 nt, Artificial Sequence
  Description of Artificial Sequence:  Enzymatic Nucleic Acid
cagcguuucugaugaggccguuaggccgaaaguggugc

SEQ ID NO: 11149 - RNA, 38 nt, Artificial Sequence
  Description of Artificial Sequence:  Enzymatic Nucleic Acid
auagaccgcugaugaggccguuaggccgaaacauguca

SEQ ID NO: 11150 - RNA, 38 nt, Artificial Sequence
  Description of Artificial Sequence:  Enzymatic Nucleic Acid
auggcauacugaugaggccguuaggccgaaaccguaca

SEQ ID NO: 11151 - RNA, 38 nt, Artificial Sequence
  Description of Artificial Sequence:  Enzymatic Nucleic Acid
gaauggcacugaugaggccguuaggccgaaagaccgua

SEQ ID NO: 11152 - RNA, 38 nt, Artificial Sequence
  Description of Artificial Sequence:  Enzymatic Nucleic Acid
gggggaggcugaugaggccguuaggccgaaauggcaua

SEQ ID NO: 11153 - RNA, 38 nt, Artificial Sequence
  Description of Artificial Sequence:  Enzymatic Nucleic Acid
cgggggagcugaugaggccguuaggccgaaaauggcau

SEQ ID NO: 11154 - RNA, 38 nt, Artificial Sequence
  Description of Artificial Sequence:  Enzymatic Nucleic Acid
augcggggcugaugaggccguuaggccgaaaggaaugg

SEQ ID NO: 11155 - RNA, 38 nt, Artificial Sequence
  Description of Artificial Sequence:  Enzymatic Nucleic Acid
guggaugucugaugaggccguuaggccgaaaugcgggg

SEQ ID NO: 11156 - RNA, 38 nt, Artificial Sequence
  Description of Artificial Sequence:  Enzymatic Nucleic Acid
uaccagugcugaugaggccguuaggccgaaaugugaug

SEQ ID NO: 11157 - RNA, 38 nt, Artificial Sequence
  Description of Artificial Sequence:  Enzymatic Nucleic Acid
acugccaacugaugaggccguuaggccgaaaccagugg

SEQ ID NO: 11158 - RNA, 38 nt, Artificial Sequence
  Description of Artificial Sequence:  Enzymatic Nucleic Acid
caacugcccugaugaggccguuaggccgaaauaccagu

SEQ ID NO: 11159 - RNA, 38 nt, Artificial Sequence
  Description of Artificial Sequence:  Enzymatic Nucleic Acid
cuuccucccugaugaggccguuaggccgaaacugccaa

SEQ ID NO: 11160 - RNA, 38 nt, Artificial Sequence
  Description of Artificial Sequence:  Enzymatic Nucleic Acid
gucacugacugaugaggccguuaggccgaaacagcuug

SEQ ID NO: 11161 - RNA, 38 nt, Artificial Sequence
  Description of Artificial Sequence:  Enzymatic Nucleic Acid
uugucacucugaugaggccguuaggccgaaagacagcu

SEQ ID NO: 11162 - RNA, 38 nt, Artificial Sequence
  Description of Artificial Sequence:  Enzymatic Nucleic Acid
cacaagggcugaugaggccguuaggccgaaauggguuu

SEQ ID NO: 11163 - RNA, 38 nt, Artificial Sequence
  Description of Artificial Sequence:  Enzymatic Nucleic Acid
uucuucaccugaugaggccguuaggccgaaaggguaug

SEQ ID NO: 11164 - RNA, 38 nt, Artificial Sequence
  Description of Artificial Sequence:  Enzymatic Nucleic Acid
cucccuggcugaugaggccguuaggccgaaaguccucc

SEQ ID NO: 11165 - RNA, 38 nt, Artificial Sequence
  Description of Artificial Sequence:  Enzymatic Nucleic Acid
ccucccugcugaugaggccguuaggccgaaaaguccuc

SEQ ID NO: 11166 - RNA, 38 nt, Artificial Sequence
  Description of Artificial Sequence:  Enzymatic Nucleic Acid
uucaauuucugaugaggccguuaggccgaaauuuccuc

SEQ ID NO: 11167 - RNA, 38 nt, Artificial Sequence
  Description of Artificial Sequence:  Enzymatic Nucleic Acid
uuaacuuccugaugaggccguuaggccgaaauuuuauu

SEQ ID NO: 11168 - RNA, 38 nt, Artificial Sequence
  Description of Artificial Sequence:  Enzymatic Nucleic Acid
uuuuuauucugaugaggccguuaggccgaaacuucaau

SEQ ID NO: 11169 - RNA, 38 nt, Artificial Sequence
  Description of Artificial Sequence:  Enzymatic Nucleic Acid
auuuuuaucugaugaggccguuaggccgaaaacuucaa

SEQ ID NO: 11170 - RNA, 38 nt, Artificial Sequence
  Description of Artificial Sequence:  Enzymatic Nucleic Acid
uugauuuucugaugaggccguuaggccgaaauuaacuu

SEQ ID NO: 11171 - RNA, 38 nt, Artificial Sequence
  Description of Artificial Sequence:  Enzymatic Nucleic Acid
agcaaauucugaugaggccguuaggccgaaauuuuuau

SEQ ID NO: 11172 - RNA, 38 nt, Artificial Sequence
  Description of Artificial Sequence:  Enzymatic Nucleic Acid
uuagagcacugaugaggccguuaggccgaaauugauuu

SEQ ID NO: 11173 - RNA, 38 nt, Artificial Sequence
  Description of Artificial Sequence:  Enzymatic Nucleic Acid
auuagagccugaugaggccguuaggccgaaaauugauu

SEQ ID NO: 11174 - RNA, 38 nt, Artificial Sequence
  Description of Artificial Sequence:  Enzymatic Nucleic Acid
uucaauuacugaugaggccguuaggccgaaagcaaauu

SEQ ID NO: 11175 - RNA, 38 nt, Artificial Sequence
  Description of Artificial Sequence:  Enzymatic Nucleic Acid
ccuucaaucugaugaggccguuaggccgaaagagcaaa

SEQ ID NO: 11176 - RNA, 38 nt, Artificial Sequence
  Description of Artificial Sequence:  Enzymatic Nucleic Acid
uuuccuuccugaugaggccguuaggccgaaauuagagc

SEQ ID NO: 11177 - RNA, 38 nt, Artificial Sequence
  Description of Artificial Sequence:  Enzymatic Nucleic Acid
aggguacucugaugaggccguuaggccgaaacaguuuu

SEQ ID NO: 11178 - RNA, 38 nt, Artificial Sequence
  Description of Artificial Sequence:  Enzymatic Nucleic Acid
aacaagggcugaugaggccguuaggccgaaacuuacag

SEQ ID NO: 11179 - RNA, 38 nt, Artificial Sequence
  Description of Artificial Sequence:  Enzymatic Nucleic Acid
uggauaaccugaugaggccguuaggccgaaaggguacu

SEQ ID NO: 11180 - RNA, 38 nt, Artificial Sequence
  Description of Artificial Sequence:  Enzymatic Nucleic Acid
gcuuggaucugaugaggccguuaggccgaaacaagggu

SEQ ID NO: 11181 - RNA, 38 nt, Artificial Sequence
  Description of Artificial Sequence:  Enzymatic Nucleic Acid
cgcuuggacugaugaggccguuaggccgaaaacaaggg

SEQ ID NO: 11182 - RNA, 38 nt, Artificial Sequence
  Description of Artificial Sequence:  Enzymatic Nucleic Acid
gccgcuugcugaugaggccguuaggccgaaauaacaag

SEQ ID NO: 11183 - RNA, 38 nt, Artificial Sequence
  Description of Artificial Sequence:  Enzymatic Nucleic Acid
acaaagcucugaugaggccguuaggccgaaacacauuu

SEQ ID NO: 11184 - RNA, 38 nt, Artificial Sequence
  Description of Artificial Sequence:  Enzymatic Nucleic Acid
uuuguacacugaugaggccguuaggccgaaagcugaca

SEQ ID NO: 11185 - RNA, 38 nt, Artificial Sequence
  Description of Artificial Sequence:  Enzymatic Nucleic Acid
auuuguaccugaugaggccguuaggccgaaaagcugac

SEQ ID NO: 11186 - RNA, 38 nt, Artificial Sequence
  Description of Artificial Sequence:  Enzymatic Nucleic Acid
cacauuugcugaugaggccguuaggccgaaacaaagcu

SEQ ID NO: 11187 - RNA, 38 nt, Artificial Sequence
  Description of Artificial Sequence:  Enzymatic Nucleic Acid
acuuuguucugaugaggccguuaggccgaaaccgcuuc

SEQ ID NO: 11188 - RNA, 38 nt, Artificial Sequence
  Description of Artificial Sequence:  Enzymatic Nucleic Acid
ccucuccccugaugaggccguuaggccgaaacuuuguu

SEQ ID NO: 11189 - RNA, 38 nt, Artificial Sequence
  Description of Artificial Sequence:  Enzymatic Nucleic Acid
uggaaggacugaugaggccguuaggccgaaaucacccu

SEQ ID NO: 11190 - RNA, 38 nt, Artificial Sequence
  Description of Artificial Sequence:  Enzymatic Nucleic Acid
cguggaagcugaugaggccguuaggccgaaagaucacc

SEQ ID NO: 11191 - RNA, 38 nt, Artificial Sequence
  Description of Artificial Sequence:  Enzymatic Nucleic Acid
ucacguggcugaugaggccguuaggccgaaaggagauc

SEQ ID NO: 11192 - RNA, 38 nt, Artificial Sequence
  Description of Artificial Sequence:  Enzymatic Nucleic Acid
gucacgugcugaugaggccguuaggccgaaaaggagau

SEQ ID NO: 11193 - RNA, 38 nt, Artificial Sequence
  Description of Artificial Sequence:  Enzymatic Nucleic Acid
aauuucagcugaugaggccguuaggccgaaaccccugg

SEQ ID NO: 11194 - RNA, 38 nt, Artificial Sequence
  Description of Artificial Sequence:  Enzymatic Nucleic Acid
ugcaaagucugaugaggccguuaggccgaaauuucagg

SEQ ID NO: 11195 - RNA, 38 nt, Artificial Sequence
  Description of Artificial Sequence:  Enzymatic Nucleic Acid
uugcaaagcugaugaggccguuaggccgaaaauuucag

SEQ ID NO: 11196 - RNA, 38 nt, Artificial Sequence
  Description of Artificial Sequence:  Enzymatic Nucleic Acid
agguugcacugaugaggccguuaggccgaaaguaauuu

SEQ ID NO: 11197 - RNA, 38 nt, Artificial Sequence
  Description of Artificial Sequence:  Enzymatic Nucleic Acid
cagguugccugaugaggccguuaggccgaaaaguaauu

SEQ ID NO: 11198 - RNA, 38 nt, Artificial Sequence
  Description of Artificial Sequence:  Enzymatic Nucleic Acid
accacaaacugaugaggccguuaggccgaaacacgcuc

SEQ ID NO: 11199 - RNA, 38 nt, Artificial Sequence
  Description of Artificial Sequence:  Enzymatic Nucleic Acid
gcaccacacugaugaggccguuaggccgaaagacacgc

SEQ ID NO: 11200 - RNA, 38 nt, Artificial Sequence
  Description of Artificial Sequence:  Enzymatic Nucleic Acid
ugcaccaccugaugaggccguuaggccgaaaagacacg

SEQ ID NO: 11201 - RNA, 38 nt, Artificial Sequence
  Description of Artificial Sequence:  Enzymatic Nucleic Acid
caaacguacugaugaggccguuaggccgaaaucugucu

SEQ ID NO: 11202 - RNA, 38 nt, Artificial Sequence
  Description of Artificial Sequence:  Enzymatic Nucleic Acid
cucaaacgcugaugaggccguuaggccgaaagaucugu

SEQ ID NO: 11203 - RNA, 38 nt, Artificial Sequence
  Description of Artificial Sequence:  Enzymatic Nucleic Acid
gguucucacugaugaggccguuaggccgaaacguagau

SEQ ID NO: 11204 - RNA, 38 nt, Artificial Sequence
  Description of Artificial Sequence:  Enzymatic Nucleic Acid
agguucuccugaugaggccguuaggccgaaaacguaga

SEQ ID NO: 11205 - RNA, 38 nt, Artificial Sequence
  Description of Artificial Sequence:  Enzymatic Nucleic Acid
uaccaugucugaugaggccguuaggccgaaagguucuc

SEQ ID NO: 11206 - RNA, 38 nt, Artificial Sequence
  Description of Artificial Sequence:  Enzymatic Nucleic Acid
caagcuugcugaugaggccguuaggccgaaaccaugug

SEQ ID NO: 11207 - RNA, 38 nt, Artificial Sequence
  Description of Artificial Sequence:  Enzymatic Nucleic Acid
ugugggcccugaugaggccguuaggccgaaagcuugua

SEQ ID NO: 11208 - RNA, 38 nt, Artificial Sequence
  Description of Artificial Sequence:  Enzymatic Nucleic Acid
gauuggcacugaugaggccguuaggccgaaaggcugug

SEQ ID NO: 11209 - RNA, 38 nt, Artificial Sequence
  Description of Artificial Sequence:  Enzymatic Nucleic Acid
cccacaugcugaugaggccguuaggccgaaauuggcag

SEQ ID NO: 11210 - RNA, 38 nt, Artificial Sequence
  Description of Artificial Sequence:  Enzymatic Nucleic Acid
gugugggccugaugaggccguuaggccgaaacucuccc

SEQ ID NO: 11211 - RNA, 38 nt, Artificial Sequence
  Description of Artificial Sequence:  Enzymatic Nucleic Acid
uucuugcacugaugaggccguuaggccgaaacaggugu

SEQ ID NO: 11212 - RNA, 38 nt, Artificial Sequence
  Description of Artificial Sequence:  Enzymatic Nucleic Acid
guucuugccugaugaggccguuaggccgaaaacaggug

SEQ ID NO: 11213 - RNA, 38 nt, Artificial Sequence
  Description of Artificial Sequence:  Enzymatic Nucleic Acid
gaguaucccugaugaggccguuaggccgaaaguucuug

SEQ ID NO: 11214 - RNA, 38 nt, Artificial Sequence
  Description of Artificial Sequence:  Enzymatic Nucleic Acid
ccaaagagcugaugaggccguuaggccgaaauccaagu

SEQ ID NO: 11215 - RNA, 38 nt, Artificial Sequence
  Description of Artificial Sequence:  Enzymatic Nucleic Acid
uuuccaaacugaugaggccguuaggccgaaaguaucca

SEQ ID NO: 11216 - RNA, 38 nt, Artificial Sequence
  Description of Artificial Sequence:  Enzymatic Nucleic Acid
aauuuccacugaugaggccguuaggccgaaagaguauc

SEQ ID NO: 11217 - RNA, 38 nt, Artificial Sequence
  Description of Artificial Sequence:  Enzymatic Nucleic Acid
caauuucccugaugaggccguuaggccgaaaagaguau

SEQ ID NO: 11218 - RNA, 38 nt, Artificial Sequence
  Description of Artificial Sequence:  Enzymatic Nucleic Acid
uggcauuccugaugaggccguuaggccgaaauuuccaa

SEQ ID NO: 11219 - RNA, 38 nt, Artificial Sequence
  Description of Artificial Sequence:  Enzymatic Nucleic Acid
uauuagagcugaugaggccguuaggccgaaacauggug

SEQ ID NO: 11220 - RNA, 38 nt, Artificial Sequence
  Description of Artificial Sequence:  Enzymatic Nucleic Acid
cuauuagacugaugaggccguuaggccgaaaacauggu

SEQ ID NO: 11221 - RNA, 38 nt, Artificial Sequence
  Description of Artificial Sequence:  Enzymatic Nucleic Acid
ugcuauuacugaugaggccguuaggccgaaagaacaug

SEQ ID NO: 11222 - RNA, 38 nt, Artificial Sequence
  Description of Artificial Sequence:  Enzymatic Nucleic Acid
ugugcuaucugaugaggccguuaggccgaaagagaaca

SEQ ID NO: 11223 - RNA, 38 nt, Artificial Sequence
  Description of Artificial Sequence:  Enzymatic Nucleic Acid
auuugugccugaugaggccguuaggccgaaauuagaga

SEQ ID NO: 11224 - RNA, 38 nt, Artificial Sequence
  Description of Artificial Sequence:  Enzymatic Nucleic Acid
augaucaacugaugaggccguuaggccgaaaugucauu

SEQ ID NO: 11225 - RNA, 38 nt, Artificial Sequence
  Description of Artificial Sequence:  Enzymatic Nucleic Acid
caugaucacugaugaggccguuaggccgaaaaugucau

SEQ ID NO: 11226 - RNA, 38 nt, Artificial Sequence
  Description of Artificial Sequence:  Enzymatic Nucleic Acid
ccaugauccugaugaggccguuaggccgaaaaauguca

SEQ ID NO: 11227 - RNA, 38 nt, Artificial Sequence
  Description of Artificial Sequence:  Enzymatic Nucleic Acid
agcuccaucugaugaggccguuaggccgaaaucaaaau

SEQ ID NO: 11228 - RNA, 38 nt, Artificial Sequence
  Description of Artificial Sequence:  Enzymatic Nucleic Acid
gcauucuucugaugaggccguuaggccgaaagcuccau

SEQ ID NO: 11229 - RNA, 38 nt, Artificial Sequence
  Description of Artificial Sequence:  Enzymatic Nucleic Acid
ugcauucucugaugaggccguuaggccgaaaagcucca

SEQ ID NO: 11230 - RNA, 38 nt, Artificial Sequence
  Description of Artificial Sequence:  Enzymatic Nucleic Acid
ccugcaagcugaugaggccguuaggccgaaaugcauuc

SEQ ID NO: 11231 - RNA, 38 nt, Artificial Sequence
  Description of Artificial Sequence:  Enzymatic Nucleic Acid
gguccugccugaugaggccguuaggccgaaaggaugca

SEQ ID NO: 11232 - RNA, 38 nt, Artificial Sequence
  Description of Artificial Sequence:  Enzymatic Nucleic Acid
ggcagacacugaugaggccguuaggccgaaagucuccu

SEQ ID NO: 11233 - RNA, 38 nt, Artificial Sequence
  Description of Artificial Sequence:  Enzymatic Nucleic Acid
gcaaggcacugaugaggccguuaggccgaaacauaguc

SEQ ID NO: 11234 - RNA, 38 nt, Artificial Sequence
  Description of Artificial Sequence:  Enzymatic Nucleic Acid
ucuugagccugaugaggccguuaggccgaaaggcagac

SEQ ID NO: 11235 - RNA, 38 nt, Artificial Sequence
  Description of Artificial Sequence:  Enzymatic Nucleic Acid
ccugucuucugaugaggccguuaggccgaaagcaaggc

SEQ ID NO: 11236 - RNA, 38 nt, Artificial Sequence
  Description of Artificial Sequence:  Enzymatic Nucleic Acid
gaccacgccugaugaggccguuaggccgaaaugucuuu

SEQ ID NO: 11237 - RNA, 38 nt, Artificial Sequence
  Description of Artificial Sequence:  Enzymatic Nucleic Acid
agcugccucugaugaggccguuaggccgaaaccacgca

SEQ ID NO: 11238 - RNA, 38 nt, Artificial Sequence
  Description of Artificial Sequence:  Enzymatic Nucleic Acid
aggacugucugaugaggccguuaggccgaaagcugccu

SEQ ID NO: 11239 - RNA, 38 nt, Artificial Sequence
  Description of Artificial Sequence:  Enzymatic Nucleic Acid
cgcucuagcugaugaggccguuaggccgaaacugugag

SEQ ID NO: 11240 - RNA, 38 nt, Artificial Sequence
  Description of Artificial Sequence:  Enzymatic Nucleic Acid
acacgcuccugaugaggccguuaggccgaaaggacugu

SEQ ID NO: 11241 - RNA, 38 nt, Artificial Sequence
  Description of Artificial Sequence:  Enzymatic Nucleic Acid
uuuccugucugaugaggccguuaggccgaaaucguggg

SEQ ID NO: 11242 - RNA, 38 nt, Artificial Sequence
  Description of Artificial Sequence:  Enzymatic Nucleic Acid
ugucgucucugaugaggccguuaggccgaaauucucca

SEQ ID NO: 11243 - RNA, 38 nt, Artificial Sequence
  Description of Artificial Sequence:  Enzymatic Nucleic Acid
uuccccaacugaugaggccguuaggccgaaacuugucg

SEQ ID NO: 11244 - RNA, 38 nt, Artificial Sequence
  Description of Artificial Sequence:  Enzymatic Nucleic Acid
cuuucccccugaugaggccguuaggccgaaauacuugu

SEQ ID NO: 11245 - RNA, 38 nt, Artificial Sequence
  Description of Artificial Sequence:  Enzymatic Nucleic Acid
gagacuuccugaugaggccguuaggccgaaaugcuuuc

SEQ ID NO: 11246 - RNA, 38 nt, Artificial Sequence
  Description of Artificial Sequence:  Enzymatic Nucleic Acid
gugcaugacugaugaggccguuaggccgaaacuucgau

SEQ ID NO: 11247 - RNA, 38 nt, Artificial Sequence
  Description of Artificial Sequence:  Enzymatic Nucleic Acid
ccgugcaucugaugaggccguuaggccgaaagacuucg

SEQ ID NO: 11248 - RNA, 38 nt, Artificial Sequence
  Description of Artificial Sequence:  Enzymatic Nucleic Acid
gauucccacugaugaggccguuaggccgaaaugccgug

SEQ ID NO: 11249 - RNA, 38 nt, Artificial Sequence
  Description of Artificial Sequence:  Enzymatic Nucleic Acid
uggaggggcugaugaggccguuaggccgaaauucccag

SEQ ID NO: 11250 - RNA, 38 nt, Artificial Sequence
  Description of Artificial Sequence:  Enzymatic Nucleic Acid
gaucugugcugaugaggccguuaggccgaaagggggau

SEQ ID NO: 11251 - RNA, 38 nt, Artificial Sequence
  Description of Artificial Sequence:  Enzymatic Nucleic Acid
aaccacaucugaugaggccguuaggccgaaaucugugg

SEQ ID NO: 11252 - RNA, 38 nt, Artificial Sequence
  Description of Artificial Sequence:  Enzymatic Nucleic Acid
uaucuuuacugaugaggccguuaggccgaaaccacaug

SEQ ID NO: 11253 - RNA, 38 nt, Artificial Sequence
  Description of Artificial Sequence:  Enzymatic Nucleic Acid
uuaucuuucugaugaggccguuaggccgaaaaccacau

SEQ ID NO: 11254 - RNA, 38 nt, Artificial Sequence
  Description of Artificial Sequence:  Enzymatic Nucleic Acid
auuaucuucugaugaggccguuaggccgaaaaaccaca

SEQ ID NO: 11255 - RNA, 38 nt, Artificial Sequence
  Description of Artificial Sequence:  Enzymatic Nucleic Acid
ggucucaucugaugaggccguuaggccgaaaucuuuaa

SEQ ID NO: 11256 - RNA, 38 nt, Artificial Sequence
  Description of Artificial Sequence:  Enzymatic Nucleic Acid
ucuucuaccugaugaggccguuaggccgaaagggucuc

SEQ ID NO: 11257 - RNA, 38 nt, Artificial Sequence
  Description of Artificial Sequence:  Enzymatic Nucleic Acid
gagucuuccugaugaggccguuaggccgaaacaagggu

SEQ ID NO: 11258 - RNA, 38 nt, Artificial Sequence
  Description of Artificial Sequence:  Enzymatic Nucleic Acid
caaugccucugaugaggccguuaggccgaaagucuucu

SEQ ID NO: 11259 - RNA, 38 nt, Artificial Sequence
  Description of Artificial Sequence:  Enzymatic Nucleic Acid
uucaauaccugaugaggccguuaggccgaaaugccuga

SEQ ID NO: 11260 - RNA, 38 nt, Artificial Sequence
  Description of Artificial Sequence:  Enzymatic Nucleic Acid
uccuucaacugaugaggccguuaggccgaaacaaugcc

SEQ ID NO: 11261 - RNA, 38 nt, Artificial Sequence
  Description of Artificial Sequence:  Enzymatic Nucleic Acid
cauccuuccugaugaggccguuaggccgaaauacaaug

SEQ ID NO: 11262 - RNA, 38 nt, Artificial Sequence
  Description of Artificial Sequence:  Enzymatic Nucleic Acid
cggauagucugaugaggccguuaggccgaaagguuccg

SEQ ID NO: 11263 - RNA, 38 nt, Artificial Sequence
  Description of Artificial Sequence:  Enzymatic Nucleic Acid
ucugcggacugaugaggccguuaggccgaaagugaggu

SEQ ID NO: 11264 - RNA, 38 nt, Artificial Sequence
  Description of Artificial Sequence:  Enzymatic Nucleic Acid
acucugcgcugaugaggccguuaggccgaaauagugag

SEQ ID NO: 11265 - RNA, 38 nt, Artificial Sequence
  Description of Artificial Sequence:  Enzymatic Nucleic Acid
cagguguacugaugaggccguuaggccgaaaggccuuc

SEQ ID NO: 11266 - RNA, 38 nt, Artificial Sequence
  Description of Artificial Sequence:  Enzymatic Nucleic Acid
ggcaggugcugaugaggccguuaggccgaaagaggccu

SEQ ID NO: 11267 - RNA, 38 nt, Artificial Sequence
  Description of Artificial Sequence:  Enzymatic Nucleic Acid
cagccaagcugaugaggccguuaggccgaaacacugca

SEQ ID NO: 11268 - RNA, 38 nt, Artificial Sequence
  Description of Artificial Sequence:  Enzymatic Nucleic Acid
acagccaacugaugaggccguuaggccgaaaacacugc

SEQ ID NO: 11269 - RNA, 38 nt, Artificial Sequence
  Description of Artificial Sequence:  Enzymatic Nucleic Acid
gcacagcccugaugaggccguuaggccgaaagaacacu

SEQ ID NO: 11270 - RNA, 38 nt, Artificial Sequence
  Description of Artificial Sequence:  Enzymatic Nucleic Acid
uuaugaaacugaugaggccguuaggccgaaaugccucc

SEQ ID NO: 11271 - RNA, 38 nt, Artificial Sequence
  Description of Artificial Sequence:  Enzymatic Nucleic Acid
auuaugaacugaugaggccguuaggccgaaaaugccuc

SEQ ID NO: 11272 - RNA, 38 nt, Artificial Sequence
  Description of Artificial Sequence:  Enzymatic Nucleic Acid
uauuaugacugaugaggccguuaggccgaaaaaugccu

SEQ ID NO: 11273 - RNA, 38 nt, Artificial Sequence
  Description of Artificial Sequence:  Enzymatic Nucleic Acid
cuauuaugcugaugaggccguuaggccgaaaaaaugcc

SEQ ID NO: 11274 - RNA, 38 nt, Artificial Sequence
  Description of Artificial Sequence:  Enzymatic Nucleic Acid
ucuauuaucugaugaggccguuaggccgaaaaaaaugc

SEQ ID NO: 11275 - RNA, 38 nt, Artificial Sequence
  Description of Artificial Sequence:  Enzymatic Nucleic Acid
ccuucuaucugaugaggccguuaggccgaaaugaaaaa

SEQ ID NO: 11276 - RNA, 38 nt, Artificial Sequence
  Description of Artificial Sequence:  Enzymatic Nucleic Acid
gcaccuuccugaugaggccguuaggccgaaauuaugaa

SEQ ID NO: 11277 - RNA, 38 nt, Artificial Sequence
  Description of Artificial Sequence:  Enzymatic Nucleic Acid
ugauuucccugaugaggccguuaggccgaaaguucguc

SEQ ID NO: 11278 - RNA, 38 nt, Artificial Sequence
  Description of Artificial Sequence:  Enzymatic Nucleic Acid
agaauaaucugaugaggccguuaggccgaaauuuccaa

SEQ ID NO: 11279 - RNA, 38 nt, Artificial Sequence
  Description of Artificial Sequence:  Enzymatic Nucleic Acid
acuagaaucugaugaggccguuaggccgaaaugauuuc

SEQ ID NO: 11280 - RNA, 38 nt, Artificial Sequence
  Description of Artificial Sequence:  Enzymatic Nucleic Acid
uacuagaacugaugaggccguuaggccgaaaaugauuu

SEQ ID NO: 11281 - RNA, 38 nt, Artificial Sequence
  Description of Artificial Sequence:  Enzymatic Nucleic Acid
ccuacuagcugaugaggccguuaggccgaaauaaugau

SEQ ID NO: 11282 - RNA, 38 nt, Artificial Sequence
  Description of Artificial Sequence:  Enzymatic Nucleic Acid
gccuacuacugaugaggccguuaggccgaaaauaauga

SEQ ID NO: 11283 - RNA, 38 nt, Artificial Sequence
  Description of Artificial Sequence:  Enzymatic Nucleic Acid
gugccuaccugaugaggccguuaggccgaaagaauaau

SEQ ID NO: 11284 - RNA, 38 nt, Artificial Sequence
  Description of Artificial Sequence:  Enzymatic Nucleic Acid
gucgugcccugaugaggccguuaggccgaaacuagaau

SEQ ID NO: 11285 - RNA, 38 nt, Artificial Sequence
  Description of Artificial Sequence:  Enzymatic Nucleic Acid
aacauggccugaugaggccguuaggccgaaaucaccgu

SEQ ID NO: 11286 - RNA, 38 nt, Artificial Sequence
  Description of Artificial Sequence:  Enzymatic Nucleic Acid
gccagaagcugaugaggccguuaggccgaaacauggca

SEQ ID NO: 11287 - RNA, 38 nt, Artificial Sequence
  Description of Artificial Sequence:  Enzymatic Nucleic Acid
agccagaacugaugaggccguuaggccgaaaacauggc

SEQ ID NO: 11288 - RNA, 38 nt, Artificial Sequence
  Description of Artificial Sequence:  Enzymatic Nucleic Acid
guagccagcugaugaggccguuaggccgaaagaacaug

SEQ ID NO: 11289 - RNA, 38 nt, Artificial Sequence
  Description of Artificial Sequence:  Enzymatic Nucleic Acid
aguagccacugaugaggccguuaggccgaaaagaacau

SEQ ID NO: 11290 - RNA, 38 nt, Artificial Sequence
  Description of Artificial Sequence:  Enzymatic Nucleic Acid
acaagaagcugaugaggccguuaggccgaaagccagaa

SEQ ID NO: 11291 - RNA, 38 nt, Artificial Sequence
  Description of Artificial Sequence:  Enzymatic Nucleic Acid
augacaagcugaugaggccguuaggccgaaaguagcca

SEQ ID NO: 11292 - RNA, 38 nt, Artificial Sequence
  Description of Artificial Sequence:  Enzymatic Nucleic Acid
gaugacaacugaugaggccguuaggccgaaaaguagcc

SEQ ID NO: 11293 - RNA, 38 nt, Artificial Sequence
  Description of Artificial Sequence:  Enzymatic Nucleic Acid
augaugaccugaugaggccguuaggccgaaagaaguag

SEQ ID NO: 11294 - RNA, 38 nt, Artificial Sequence
  Description of Artificial Sequence:  Enzymatic Nucleic Acid
aggaugaucugaugaggccguuaggccgaaacaagaag

SEQ ID NO: 11295 - RNA, 38 nt, Artificial Sequence
  Description of Artificial Sequence:  Enzymatic Nucleic Acid
ccuaggaucugaugaggccguuaggccgaaaugacaag

SEQ ID NO: 11296 - RNA, 38 nt, Artificial Sequence
  Description of Artificial Sequence:  Enzymatic Nucleic Acid
gucccuagcugaugaggccguuaggccgaaaugaugac

SEQ ID NO: 11297 - RNA, 38 nt, Artificial Sequence
  Description of Artificial Sequence:  Enzymatic Nucleic Acid
acgguccccugaugaggccguuaggccgaaaggaugau

SEQ ID NO: 11298 - RNA, 38 nt, Artificial Sequence
  Description of Artificial Sequence:  Enzymatic Nucleic Acid
gcccgcuucugaugaggccguuaggccgaaacgguccc

SEQ ID NO: 11299 - RNA, 38 nt, Artificial Sequence
  Description of Artificial Sequence:  Enzymatic Nucleic Acid
ggcccgcucugaugaggccguuaggccgaaaacggucc

SEQ ID NO: 11300 - RNA, 38 nt, Artificial Sequence
  Description of Artificial Sequence:  Enzymatic Nucleic Acid
uggacaagcugaugaggccguuaggccgaaagccuguc

SEQ ID NO: 11301 - RNA, 38 nt, Artificial Sequence
  Description of Artificial Sequence:  Enzymatic Nucleic Acid
cgauggaccugaugaggccguuaggccgaaaguagccu

SEQ ID NO: 11302 - RNA, 38 nt, Artificial Sequence
  Description of Artificial Sequence:  Enzymatic Nucleic Acid
ugacgaugcugaugaggccguuaggccgaaacaaguag

SEQ ID NO: 11303 - RNA, 38 nt, Artificial Sequence
  Description of Artificial Sequence:  Enzymatic Nucleic Acid
uccaugaccugaugaggccguuaggccgaaauggacaa

SEQ ID NO: 11304 - RNA, 38 nt, Artificial Sequence
  Description of Artificial Sequence:  Enzymatic Nucleic Acid
ggauccaucugaugaggccguuaggccgaaacgaugga

SEQ ID NO: 11305 - RNA, 38 nt, Artificial Sequence
  Description of Artificial Sequence:  Enzymatic Nucleic Acid
uucaucugcugaugaggccguuaggccgaaauccauga

SEQ ID NO: 11306 - RNA, 38 nt, Artificial Sequence
  Description of Artificial Sequence:  Enzymatic Nucleic Acid
uccaauggcugaugaggccguuaggccgaaaguucauc

SEQ ID NO: 11307 - RNA, 38 nt, Artificial Sequence
  Description of Artificial Sequence:  Enzymatic Nucleic Acid
guucaucccugaugaggccguuaggccgaaaugggagu

SEQ ID NO: 11308 - RNA, 38 nt, Artificial Sequence
  Description of Artificial Sequence:  Enzymatic Nucleic Acid
ucguucaccugaugaggccguuaggccgaaauguucau

SEQ ID NO: 11309 - RNA, 38 nt, Artificial Sequence
  Description of Artificial Sequence:  Enzymatic Nucleic Acid
ggcaucaucugaugaggccguuaggccgaaaggcaguc

SEQ ID NO: 11310 - RNA, 38 nt, Artificial Sequence
  Description of Artificial Sequence:  Enzymatic Nucleic Acid
uggcaucacugaugaggccguuaggccgaaaaggcagu

SEQ ID NO: 11311 - RNA, 38 nt, Artificial Sequence
  Description of Artificial Sequence:  Enzymatic Nucleic Acid
cucuggggcugaugaggccguuaggccgaaauucccau

SEQ ID NO: 11312 - RNA, 38 nt, Artificial Sequence
  Description of Artificial Sequence:  Enzymatic Nucleic Acid
ucucugggcugaugaggccguuaggccgaaaauuccca

SEQ ID NO: 11313 - RNA, 38 nt, Artificial Sequence
  Description of Artificial Sequence:  Enzymatic Nucleic Acid
ggcuuacccugaugaggccguuaggccgaaagguucag

SEQ ID NO: 11314 - RNA, 38 nt, Artificial Sequence
  Description of Artificial Sequence:  Enzymatic Nucleic Acid
aagaggcucugaugaggccguuaggccgaaaccuaggu

SEQ ID NO: 11315 - RNA, 38 nt, Artificial Sequence
  Description of Artificial Sequence:  Enzymatic Nucleic Acid
acggccaacugaugaggccguuaggccgaaaggcuuac

SEQ ID NO: 11316 - RNA, 38 nt, Artificial Sequence
  Description of Artificial Sequence:  Enzymatic Nucleic Acid
ccacggcccugaugaggccguuaggccgaaagaggcuu

SEQ ID NO: 11317 - RNA, 38 nt, Artificial Sequence
  Description of Artificial Sequence:  Enzymatic Nucleic Acid
cuuggccacugaugaggccguuaggccgaaaggcacca

SEQ ID NO: 11318 - RNA, 38 nt, Artificial Sequence
  Description of Artificial Sequence:  Enzymatic Nucleic Acid
ucuuggcccugaugaggccguuaggccgaaaaggcacc

SEQ ID NO: 11319 - RNA, 38 nt, Artificial Sequence
  Description of Artificial Sequence:  Enzymatic Nucleic Acid
ucugcuuccugaugaggccguuaggccgaaaucucuug

SEQ ID NO: 11320 - RNA, 38 nt, Artificial Sequence
  Description of Artificial Sequence:  Enzymatic Nucleic Acid
caauuccacugaugaggccguuaggccgaaaggcaucu

SEQ ID NO: 11321 - RNA, 38 nt, Artificial Sequence
  Description of Artificial Sequence:  Enzymatic Nucleic Acid
ucaauucccugaugaggccguuaggccgaaaaggcauc

SEQ ID NO: 11322 - RNA, 38 nt, Artificial Sequence
  Description of Artificial Sequence:  Enzymatic Nucleic Acid
gucuuguccugaugaggccguuaggccgaaauuccaaa

SEQ ID NO: 11323 - RNA, 38 nt, Artificial Sequence
  Description of Artificial Sequence:  Enzymatic Nucleic Acid
uguccugccugaugaggccguuaggccgaaaguugcug

SEQ ID NO: 11324 - RNA, 38 nt, Artificial Sequence
  Description of Artificial Sequence:  Enzymatic Nucleic Acid
uugacugccugaugaggccguuaggccgaaacuguccu

SEQ ID NO: 11325 - RNA, 38 nt, Artificial Sequence
  Description of Artificial Sequence:  Enzymatic Nucleic Acid
aacauuuucugaugaggccguuaggccgaaacugcuac

SEQ ID NO: 11326 - RNA, 38 nt, Artificial Sequence
  Description of Artificial Sequence:  Enzymatic Nucleic Acid
cuucuuuccugaugaggccguuaggccgaaacauuuug

SEQ ID NO: 11327 - RNA, 38 nt, Artificial Sequence
  Description of Artificial Sequence:  Enzymatic Nucleic Acid
gagagcuccugaugaggccguuaggccgaaaugcucac

SEQ ID NO: 11328 - RNA, 38 nt, Artificial Sequence
  Description of Artificial Sequence:  Enzymatic Nucleic Acid
agacaugacugaugaggccguuaggccgaaagcucgau

SEQ ID NO: 11329 - RNA, 38 nt, Artificial Sequence
  Description of Artificial Sequence:  Enzymatic Nucleic Acid
ucagacaucugaugaggccguuaggccgaaagagcucg

SEQ ID NO: 11330 - RNA, 38 nt, Artificial Sequence
  Description of Artificial Sequence:  Enzymatic Nucleic Acid
ugaguucacugaugaggccguuaggccgaaacaugaga

SEQ ID NO: 11331 - RNA, 38 nt, Artificial Sequence
  Description of Artificial Sequence:  Enzymatic Nucleic Acid
aggaucuucugaugaggccguuaggccgaaaguucaga

SEQ ID NO: 11332 - RNA, 38 nt, Artificial Sequence
  Description of Artificial Sequence:  Enzymatic Nucleic Acid
ugaaugagcugaugaggccguuaggccgaaaucuugag

SEQ ID NO: 11333 - RNA, 38 nt, Artificial Sequence
  Description of Artificial Sequence:  Enzymatic Nucleic Acid
auaugaaucugaugaggccguuaggccgaaaggaucuu

SEQ ID NO: 11334 - RNA, 38 nt, Artificial Sequence
  Description of Artificial Sequence:  Enzymatic Nucleic Acid
ccaauaugcugaugaggccguuaggccgaaaugaggau

SEQ ID NO: 11335 - RNA, 38 nt, Artificial Sequence
  Description of Artificial Sequence:  Enzymatic Nucleic Acid
accaauaucugaugaggccguuaggccgaaaaugagga

SEQ ID NO: 11336 - RNA, 38 nt, Artificial Sequence
  Description of Artificial Sequence:  Enzymatic Nucleic Acid
gugaccaacugaugaggccguuaggccgaaaugaauga

SEQ ID NO: 11337 - RNA, 38 nt, Artificial Sequence
  Description of Artificial Sequence:  Enzymatic Nucleic Acid
uggugacccugaugaggccguuaggccgaaauaugaau

SEQ ID NO: 11338 - RNA, 38 nt, Artificial Sequence
  Description of Artificial Sequence:  Enzymatic Nucleic Acid
gagauggucugaugaggccguuaggccgaaaccaauau

SEQ ID NO: 11339 - RNA, 38 nt, Artificial Sequence
  Description of Artificial Sequence:  Enzymatic Nucleic Acid
cacauugacugaugaggccguuaggccgaaauggugac

SEQ ID NO: 11340 - RNA, 38 nt, Artificial Sequence
  Description of Artificial Sequence:  Enzymatic Nucleic Acid
accacauucugaugaggccguuaggccgaaagauggug

SEQ ID NO: 11341 - RNA, 38 nt, Artificial Sequence
  Description of Artificial Sequence:  Enzymatic Nucleic Acid
agaagguucugaugaggccguuaggccgaaaccacauu

SEQ ID NO: 11342 - RNA, 38 nt, Artificial Sequence
  Description of Artificial Sequence:  Enzymatic Nucleic Acid
gcaccuagcugaugaggccguuaggccgaaagguugac

SEQ ID NO: 11343 - RNA, 38 nt, Artificial Sequence
  Description of Artificial Sequence:  Enzymatic Nucleic Acid
ggcaccuacugaugaggccguuaggccgaaaagguuga

SEQ ID NO: 11344 - RNA, 38 nt, Artificial Sequence
  Description of Artificial Sequence:  Enzymatic Nucleic Acid
caggcacccugaugaggccguuaggccgaaagaagguu

SEQ ID NO: 11345 - RNA, 38 nt, Artificial Sequence
  Description of Artificial Sequence:  Enzymatic Nucleic Acid
uggcuuggcugaugaggccguuaggccgaaacaggcac

SEQ ID NO: 11346 - RNA, 38 nt, Artificial Sequence
  Description of Artificial Sequence:  Enzymatic Nucleic Acid
aucaccaucugaugaggccguuaggccgaaaguggccc

SEQ ID NO: 11347 - RNA, 38 nt, Artificial Sequence
  Description of Artificial Sequence:  Enzymatic Nucleic Acid
aauuccaccugaugaggccguuaggccgaaaucaccau

SEQ ID NO: 11348 - RNA, 38 nt, Artificial Sequence
  Description of Artificial Sequence:  Enzymatic Nucleic Acid
auuugcagcugaugaggccguuaggccgaaauuccaca

SEQ ID NO: 11349 - RNA, 38 nt, Artificial Sequence
  Description of Artificial Sequence:  Enzymatic Nucleic Acid
aauuugcacugaugaggccguuaggccgaaaauuccac

SEQ ID NO: 11350 - RNA, 38 nt, Artificial Sequence
  Description of Artificial Sequence:  Enzymatic Nucleic Acid
gguuuccacugaugaggccguuaggccgaaauuugcag

SEQ ID NO: 11351 - RNA, 38 nt, Artificial Sequence
  Description of Artificial Sequence:  Enzymatic Nucleic Acid
agguuucccugaugaggccguuaggccgaaaauuugca

SEQ ID NO: 11352 - RNA, 38 nt, Artificial Sequence
  Description of Artificial Sequence:  Enzymatic Nucleic Acid
gguaagugcugaugaggccguuaggccgaaacagguuu

SEQ ID NO: 11353 - RNA, 38 nt, Artificial Sequence
  Description of Artificial Sequence:  Enzymatic Nucleic Acid
ccucaggucugaugaggccguuaggccgaaaguggaca

SEQ ID NO: 11354 - RNA, 38 nt, Artificial Sequence
  Description of Artificial Sequence:  Enzymatic Nucleic Acid
uccucaggcugaugaggccguuaggccgaaaaguggac

SEQ ID NO: 11355 - RNA, 38 nt, Artificial Sequence
  Description of Artificial Sequence:  Enzymatic Nucleic Acid
aggggacacugaugaggccguuaggccgaaauucauuu

SEQ ID NO: 11356 - RNA, 38 nt, Artificial Sequence
  Description of Artificial Sequence:  Enzymatic Nucleic Acid
uaggggaccugaugaggccguuaggccgaaaauucauu

SEQ ID NO: 11357 - RNA, 38 nt, Artificial Sequence
  Description of Artificial Sequence:  Enzymatic Nucleic Acid
uuguagggcugaugaggccguuaggccgaaacaaauuc

SEQ ID NO: 11358 - RNA, 38 nt, Artificial Sequence
  Description of Artificial Sequence:  Enzymatic Nucleic Acid
uggucuugcugaugaggccguuaggccgaaaggggaca

SEQ ID NO: 11359 - RNA, 38 nt, Artificial Sequence
  Description of Artificial Sequence:  Enzymatic Nucleic Acid
cuugacggcugaugaggccguuaggccgaaaucgugcc

SEQ ID NO: 11360 - RNA, 38 nt, Artificial Sequence
  Description of Artificial Sequence:  Enzymatic Nucleic Acid
ccuugacgcugaugaggccguuaggccgaaaaucgugc

SEQ ID NO: 11361 - RNA, 38 nt, Artificial Sequence
  Description of Artificial Sequence:  Enzymatic Nucleic Acid
uuucccuucugaugaggccguuaggccgaaacggaauc

SEQ ID NO: 11362 - RNA, 38 nt, Artificial Sequence
  Description of Artificial Sequence:  Enzymatic Nucleic Acid
cuccaacgcugaugaggccguuaggccgaaagucuuuc

SEQ ID NO: 11363 - RNA, 38 nt, Artificial Sequence
  Description of Artificial Sequence:  Enzymatic Nucleic Acid
auugcucccugaugaggccguuaggccgaaacguaguc

SEQ ID NO: 11364 - RNA, 38 nt, Artificial Sequence
  Description of Artificial Sequence:  Enzymatic Nucleic Acid
uccacaggcugaugaggccguuaggccgaaauugcucc

SEQ ID NO: 11365 - RNA, 38 nt, Artificial Sequence
  Description of Artificial Sequence:  Enzymatic Nucleic Acid
ccguuucacugaugaggccguuaggccgaaauccacag

SEQ ID NO: 11366 - RNA, 38 nt, Artificial Sequence
  Description of Artificial Sequence:  Enzymatic Nucleic Acid
ugcugucccugaugaggccguuaggccgaaagcgccgu

SEQ ID NO: 11367 - RNA, 38 nt, Artificial Sequence
  Description of Artificial Sequence:  Enzymatic Nucleic Acid
cuacuggucugaugaggccguuaggccgaaaugcuguc

SEQ ID NO: 11368 - RNA, 38 nt, Artificial Sequence
  Description of Artificial Sequence:  Enzymatic Nucleic Acid
gcucuggccugaugaggccguuaggccgaaacugguga

SEQ ID NO: 11369 - RNA, 38 nt, Artificial Sequence
  Description of Artificial Sequence:  Enzymatic Nucleic Acid
agcuggcucugaugaggccguuaggccgaaagcucugg

SEQ ID NO: 11370 - RNA, 38 nt, Artificial Sequence
  Description of Artificial Sequence:  Enzymatic Nucleic Acid
caaauccacugaugaggccguuaggccgaaagcuggcu

SEQ ID NO: 11371 - RNA, 38 nt, Artificial Sequence
  Description of Artificial Sequence:  Enzymatic Nucleic Acid
ccuccacacugaugaggccguuaggccgaaauccagag

SEQ ID NO: 11372 - RNA, 38 nt, Artificial Sequence
  Description of Artificial Sequence:  Enzymatic Nucleic Acid
uccuccaccugaugaggccguuaggccgaaaauccaga

SEQ ID NO: 11373 - RNA, 38 nt, Artificial Sequence
  Description of Artificial Sequence:  Enzymatic Nucleic Acid
cacugaggcugaugaggccguuaggccgaaacuucucc

SEQ ID NO: 11374 - RNA, 38 nt, Artificial Sequence
  Description of Artificial Sequence:  Enzymatic Nucleic Acid
acaucacucugaugaggccguuaggccgaaagggacuu

SEQ ID NO: 11375 - RNA, 38 nt, Artificial Sequence
  Description of Artificial Sequence:  Enzymatic Nucleic Acid
ucuucuuccugaugaggccguuaggccgaaacaucacu

SEQ ID NO: 11376 - RNA, 38 nt, Artificial Sequence
  Description of Artificial Sequence:  Enzymatic Nucleic Acid
aucuucagcugaugaggccguuaggccgaaagcuuccu

SEQ ID NO: 11377 - RNA, 38 nt, Artificial Sequence
  Description of Artificial Sequence:  Enzymatic Nucleic Acid
cuuauacacugaugaggccguuaggccgaaaucuucag

SEQ ID NO: 11378 - RNA, 38 nt, Artificial Sequence
  Description of Artificial Sequence:  Enzymatic Nucleic Acid
aguccuuacugaugaggccguuaggccgaaacagaucu

SEQ ID NO: 11379 - RNA, 38 nt, Artificial Sequence
  Description of Artificial Sequence:  Enzymatic Nucleic Acid
gaaguccucugaugaggccguuaggccgaaauacagau

SEQ ID NO: 11380 - RNA, 38 nt, Artificial Sequence
  Description of Artificial Sequence:  Enzymatic Nucleic Acid
aggucaggcugaugaggccguuaggccgaaaguccuua

SEQ ID NO: 11381 - RNA, 38 nt, Artificial Sequence
  Description of Artificial Sequence:  Enzymatic Nucleic Acid
aaggucagcugaugaggccguuaggccgaaaaguccuu

SEQ ID NO: 11382 - RNA, 38 nt, Artificial Sequence
  Description of Artificial Sequence:  Enzymatic Nucleic Acid
gaugcucccugaugaggccguuaggccgaaaggucagg

SEQ ID NO: 11383 - RNA, 38 nt, Artificial Sequence
  Description of Artificial Sequence:  Enzymatic Nucleic Acid
acagaugacugaugaggccguuaggccgaaaugcucca

SEQ ID NO: 11384 - RNA, 38 nt, Artificial Sequence
  Description of Artificial Sequence:  Enzymatic Nucleic Acid
uaacagaucugaugaggccguuaggccgaaagaugcuc

SEQ ID NO: 11385 - RNA, 38 nt, Artificial Sequence
  Description of Artificial Sequence:  Enzymatic Nucleic Acid
cuguaacacugaugaggccguuaggccgaaaugagaug

SEQ ID NO: 11386 - RNA, 38 nt, Artificial Sequence
  Description of Artificial Sequence:  Enzymatic Nucleic Acid
gaagcugucugaugaggccguuaggccgaaacagauga

SEQ ID NO: 11387 - RNA, 38 nt, Artificial Sequence
  Description of Artificial Sequence:  Enzymatic Nucleic Acid
ggaagcugcugaugaggccguuaggccgaaaacagaug

SEQ ID NO: 11388 - RNA, 38 nt, Artificial Sequence
  Description of Artificial Sequence:  Enzymatic Nucleic Acid
ccacuuggcugaugaggccguuaggccgaaagcuguaa

SEQ ID NO: 11389 - RNA, 38 nt, Artificial Sequence
  Description of Artificial Sequence:  Enzymatic Nucleic Acid
gccacuugcugaugaggccguuaggccgaaaagcugua

SEQ ID NO: 11390 - RNA, 38 nt, Artificial Sequence
  Description of Artificial Sequence:  Enzymatic Nucleic Acid
caugcccucugaugaggccguuaggccgaaagccacuu

SEQ ID NO: 11391 - RNA, 38 nt, Artificial Sequence
  Description of Artificial Sequence:  Enzymatic Nucleic Acid
augccaagcugaugaggccguuaggccgaaacuccaug

SEQ ID NO: 11392 - RNA, 38 nt, Artificial Sequence
  Description of Artificial Sequence:  Enzymatic Nucleic Acid
gaugccaacugaugaggccguuaggccgaaaacuccau

SEQ ID NO: 11393 - RNA, 38 nt, Artificial Sequence
  Description of Artificial Sequence:  Enzymatic Nucleic Acid
gcgaugcccugaugaggccguuaggccgaaagaacucc

SEQ ID NO: 11394 - RNA, 38 nt, Artificial Sequence
  Description of Artificial Sequence:  Enzymatic Nucleic Acid
acuuucgccugaugaggccguuaggccgaaaugccaag

SEQ ID NO: 11395 - RNA, 38 nt, Artificial Sequence
  Description of Artificial Sequence:  Enzymatic Nucleic Acid
ccuguggacugaugaggccguuaggccgaaacacuuuc

SEQ ID NO: 11396 - RNA, 38 nt, Artificial Sequence
  Description of Artificial Sequence:  Enzymatic Nucleic Acid
ucccugugcugaugaggccguuaggccgaaauacacuu

SEQ ID NO: 11397 - RNA, 38 nt, Artificial Sequence
  Description of Artificial Sequence:  Enzymatic Nucleic Acid
uaagaggacugaugaggccguuaggccgaaauuucgug

SEQ ID NO: 11398 - RNA, 38 nt, Artificial Sequence
  Description of Artificial Sequence:  Enzymatic Nucleic Acid
gauaagagcugaugaggccguuaggccgaaauauuucg

SEQ ID NO: 11399 - RNA, 38 nt, Artificial Sequence
  Description of Artificial Sequence:  Enzymatic Nucleic Acid
uccgauaacugaugaggccguuaggccgaaaggauauu

SEQ ID NO: 11400 - RNA, 38 nt, Artificial Sequence
  Description of Artificial Sequence:  Enzymatic Nucleic Acid
ucuccgaucugaugaggccguuaggccgaaagaggaua

SEQ ID NO: 11401 - RNA, 38 nt, Artificial Sequence
  Description of Artificial Sequence:  Enzymatic Nucleic Acid
uucuccgacugaugaggccguuaggccgaaaagaggau

SEQ ID NO: 11402 - RNA, 38 nt, Artificial Sequence
  Description of Artificial Sequence:  Enzymatic Nucleic Acid
ucuucucccugaugaggccguuaggccgaaauaagagg

SEQ ID NO: 11403 - RNA, 38 nt, Artificial Sequence
  Description of Artificial Sequence:  Enzymatic Nucleic Acid
cagauuuucugaugaggccguuaggccgaaaccacguu

SEQ ID NO: 11404 - RNA, 38 nt, Artificial Sequence
  Description of Artificial Sequence:  Enzymatic Nucleic Acid
acagauuucugaugaggccguuaggccgaaaaccacgu

SEQ ID NO: 11405 - RNA, 38 nt, Artificial Sequence
  Description of Artificial Sequence:  Enzymatic Nucleic Acid
aagucacacugaugaggccguuaggccgaaauuuuaac

SEQ ID NO: 11406 - RNA, 38 nt, Artificial Sequence
  Description of Artificial Sequence:  Enzymatic Nucleic Acid
ccaagccacugaugaggccguuaggccgaaagucacag

SEQ ID NO: 11407 - RNA, 38 nt, Artificial Sequence
  Description of Artificial Sequence:  Enzymatic Nucleic Acid
gccaagcccugaugaggccguuaggccgaaaagucaca

SEQ ID NO: 11408 - RNA, 38 nt, Artificial Sequence
  Description of Artificial Sequence:  Enzymatic Nucleic Acid
cccgggcccugaugaggccguuaggccgaaagccaaag

SEQ ID NO: 11409 - RNA, 38 nt, Artificial Sequence
  Description of Artificial Sequence:  Enzymatic Nucleic Acid
uuuauaaacugaugaggccguuaggccgaaaucccggg

SEQ ID NO: 11410 - RNA, 38 nt, Artificial Sequence
  Description of Artificial Sequence:  Enzymatic Nucleic Acid
ucuuuauacugaugaggccguuaggccgaaauaucccg

SEQ ID NO: 11411 - RNA, 38 nt, Artificial Sequence
  Description of Artificial Sequence:  Enzymatic Nucleic Acid
aucuuuaucugaugaggccguuaggccgaaaauauccc

SEQ ID NO: 11412 - RNA, 38 nt, Artificial Sequence
  Description of Artificial Sequence:  Enzymatic Nucleic Acid
gaucuuuacugaugaggccguuaggccgaaaaauaucc

SEQ ID NO: 11413 - RNA, 38 nt, Artificial Sequence
  Description of Artificial Sequence:  Enzymatic Nucleic Acid
uggaucuucugaugaggccguuaggccgaaauaaauau

SEQ ID NO: 11414 - RNA, 38 nt, Artificial Sequence
  Description of Artificial Sequence:  Enzymatic Nucleic Acid
auaaucugcugaugaggccguuaggccgaaaucuuuau

SEQ ID NO: 11415 - RNA, 38 nt, Artificial Sequence
  Description of Artificial Sequence:  Enzymatic Nucleic Acid
ucugacaucugaugaggccguuaggccgaaaucuggau

SEQ ID NO: 11416 - RNA, 38 nt, Artificial Sequence
  Description of Artificial Sequence:  Enzymatic Nucleic Acid
uucugacacugaugaggccguuaggccgaaaaucugga

SEQ ID NO: 11417 - RNA, 38 nt, Artificial Sequence
  Description of Artificial Sequence:  Enzymatic Nucleic Acid
ccuuuucucugaugaggccguuaggccgaaacauaauc

SEQ ID NO: 11418 - RNA, 38 nt, Artificial Sequence
  Description of Artificial Sequence:  Enzymatic Nucleic Acid
agggaggccugaugaggccguuaggccgaaagcaucuc

SEQ ID NO: 11419 - RNA, 38 nt, Artificial Sequence
  Description of Artificial Sequence:  Enzymatic Nucleic Acid
uucaaaggcugaugaggccguuaggccgaaaggcgagc

SEQ ID NO: 11420 - RNA, 38 nt, Artificial Sequence
  Description of Artificial Sequence:  Enzymatic Nucleic Acid
ccauuucacugaugaggccguuaggccgaaagggaggc

SEQ ID NO: 11421 - RNA, 38 nt, Artificial Sequence
  Description of Artificial Sequence:  Enzymatic Nucleic Acid
uccauuuccugaugaggccguuaggccgaaaagggagg

SEQ ID NO: 11422 - RNA, 38 nt, Artificial Sequence
  Description of Artificial Sequence:  Enzymatic Nucleic Acid
cugucaaacugaugaggccguuaggccgaaauuguuuc

SEQ ID NO: 11423 - RNA, 38 nt, Artificial Sequence
  Description of Artificial Sequence:  Enzymatic Nucleic Acid
ucugucaacugaugaggccguuaggccgaaaauuguuu

SEQ ID NO: 11424 - RNA, 38 nt, Artificial Sequence
  Description of Artificial Sequence:  Enzymatic Nucleic Acid
cucugucacugaugaggccguuaggccgaaaaauuguu

SEQ ID NO: 11425 - RNA, 38 nt, Artificial Sequence
  Description of Artificial Sequence:  Enzymatic Nucleic Acid
acucuguccugaugaggccguuaggccgaaaaaauugu

SEQ ID NO: 11426 - RNA, 38 nt, Artificial Sequence
  Description of Artificial Sequence:  Enzymatic Nucleic Acid
ggauugugcugaugaggccguuaggccgaaacacucug

SEQ ID NO: 11427 - RNA, 38 nt, Artificial Sequence
  Description of Artificial Sequence:  Enzymatic Nucleic Acid
ucacucugcugaugaggccguuaggccgaaauugugua

SEQ ID NO: 11428 - RNA, 38 nt, Artificial Sequence
  Description of Artificial Sequence:  Enzymatic Nucleic Acid
aaagaccacugaugaggccguuaggccgaaacgucacu

SEQ ID NO: 11429 - RNA, 38 nt, Artificial Sequence
  Description of Artificial Sequence:  Enzymatic Nucleic Acid
caccaaaacugaugaggccguuaggccgaaaccagacg

SEQ ID NO: 11430 - RNA, 38 nt, Artificial Sequence
  Description of Artificial Sequence:  Enzymatic Nucleic Acid
aacaccaacugaugaggccguuaggccgaaagaccaga

SEQ ID NO: 11431 - RNA, 38 nt, Artificial Sequence
  Description of Artificial Sequence:  Enzymatic Nucleic Acid
aaacaccacugaugaggccguuaggccgaaaagaccag

SEQ ID NO: 11432 - RNA, 38 nt, Artificial Sequence
  Description of Artificial Sequence:  Enzymatic Nucleic Acid
aaaacacccugaugaggccguuaggccgaaaaagacca

SEQ ID NO: 11433 - RNA, 38 nt, Artificial Sequence
  Description of Artificial Sequence:  Enzymatic Nucleic Acid
cacagcaacugaugaggccguuaggccgaaacaccaaa

SEQ ID NO: 11434 - RNA, 38 nt, Artificial Sequence
  Description of Artificial Sequence:  Enzymatic Nucleic Acid
ccacagcacugaugaggccguuaggccgaaaacaccaa

SEQ ID NO: 11435 - RNA, 38 nt, Artificial Sequence
  Description of Artificial Sequence:  Enzymatic Nucleic Acid
cccacagccugaugaggccguuaggccgaaaaacacca

SEQ ID NO: 11436 - RNA, 38 nt, Artificial Sequence
  Description of Artificial Sequence:  Enzymatic Nucleic Acid
aaggaaaacugaugaggccguuaggccgaaauuuccca

SEQ ID NO: 11437 - RNA, 38 nt, Artificial Sequence
  Description of Artificial Sequence:  Enzymatic Nucleic Acid
cuaaggaacugaugaggccguuaggccgaaauauuucc

SEQ ID NO: 11438 - RNA, 38 nt, Artificial Sequence
  Description of Artificial Sequence:  Enzymatic Nucleic Acid
ccuaaggacugaugaggccguuaggccgaaaauauuuc

SEQ ID NO: 11439 - RNA, 38 nt, Artificial Sequence
  Description of Artificial Sequence:  Enzymatic Nucleic Acid
accuaaggcugaugaggccguuaggccgaaaaauauuu

SEQ ID NO: 11440 - RNA, 38 nt, Artificial Sequence
  Description of Artificial Sequence:  Enzymatic Nucleic Acid
caccuaagcugaugaggccguuaggccgaaaaaauauu

SEQ ID NO: 11441 - RNA, 38 nt, Artificial Sequence
  Description of Artificial Sequence:  Enzymatic Nucleic Acid
aagcaccucugaugaggccguuaggccgaaaggaaaau

SEQ ID NO: 11442 - RNA, 38 nt, Artificial Sequence
  Description of Artificial Sequence:  Enzymatic Nucleic Acid
gaagcacccugaugaggccguuaggccgaaaaggaaaa

SEQ ID NO: 11443 - RNA, 38 nt, Artificial Sequence
  Description of Artificial Sequence:  Enzymatic Nucleic Acid
auauggagcugaugaggccguuaggccgaaagcaccua

SEQ ID NO: 11444 - RNA, 38 nt, Artificial Sequence
  Description of Artificial Sequence:  Enzymatic Nucleic Acid
gauauggacugaugaggccguuaggccgaaaagcaccu

SEQ ID NO: 11445 - RNA, 38 nt, Artificial Sequence
  Description of Artificial Sequence:  Enzymatic Nucleic Acid
aggauaugcugaugaggccguuaggccgaaagaagcac

SEQ ID NO: 11446 - RNA, 38 nt, Artificial Sequence
  Description of Artificial Sequence:  Enzymatic Nucleic Acid
ccccaggacugaugaggccguuaggccgaaauggagaa

SEQ ID NO: 11447 - RNA, 38 nt, Artificial Sequence
  Description of Artificial Sequence:  Enzymatic Nucleic Acid
uaccccagcugaugaggccguuaggccgaaauauggag

SEQ ID NO: 11448 - RNA, 38 nt, Artificial Sequence
  Description of Artificial Sequence:  Enzymatic Nucleic Acid
ucaaucuucugaugaggccguuaggccgaaaccccagg

SEQ ID NO: 11449 - RNA, 38 nt, Artificial Sequence
  Description of Artificial Sequence:  Enzymatic Nucleic Acid
ucuucauccugaugaggccguuaggccgaaaucuuuac

SEQ ID NO: 11450 - RNA, 38 nt, Artificial Sequence
  Description of Artificial Sequence:  Enzymatic Nucleic Acid
gccuacaacugaugaggccguuaggccgaaauucuuca

SEQ ID NO: 11451 - RNA, 38 nt, Artificial Sequence
  Description of Artificial Sequence:  Enzymatic Nucleic Acid
cgccuacacugaugaggccguuaggccgaaaauucuuc

SEQ ID NO: 11452 - RNA, 38 nt, Artificial Sequence
  Description of Artificial Sequence:  Enzymatic Nucleic Acid
ucgccuaccugaugaggccguuaggccgaaaaauucuu

SEQ ID NO: 11453 - RNA, 38 nt, Artificial Sequence
  Description of Artificial Sequence:  Enzymatic Nucleic Acid
caaucgcccugaugaggccguuaggccgaaacaaaauu

SEQ ID NO: 11454 - RNA, 38 nt, Artificial Sequence
  Description of Artificial Sequence:  Enzymatic Nucleic Acid
cuucuuuccugaugaggccguuaggccgaaaucgccua

SEQ ID NO: 11455 - RNA, 38 nt, Artificial Sequence
  Description of Artificial Sequence:  Enzymatic Nucleic Acid
ccucauuccugaugaggccguuaggccgaaaguuccuu

SEQ ID NO: 11456 - RNA, 38 nt, Artificial Sequence
  Description of Artificial Sequence:  Enzymatic Nucleic Acid
uguaguaucugaugaggccguuaggccgaaaucagggg

SEQ ID NO: 11457 - RNA, 38 nt, Artificial Sequence
  Description of Artificial Sequence:  Enzymatic Nucleic Acid
guguaguacugaugaggccguuaggccgaaaaucaggg

SEQ ID NO: 11458 - RNA, 38 nt, Artificial Sequence
  Description of Artificial Sequence:  Enzymatic Nucleic Acid
ugguguagcugaugaggccguuaggccgaaauaaucag

SEQ ID NO: 11459 - RNA, 38 nt, Artificial Sequence
  Description of Artificial Sequence:  Enzymatic Nucleic Acid
uucuggugcugaugaggccguuaggccgaaaguauaau

SEQ ID NO: 11460 - RNA, 38 nt, Artificial Sequence
  Description of Artificial Sequence:  Enzymatic Nucleic Acid
uggucuggcugaugaggccguuaggccgaaacauuucu

SEQ ID NO: 11461 - RNA, 38 nt, Artificial Sequence
  Description of Artificial Sequence:  Enzymatic Nucleic Acid
gggucucucugaugaggccguuaggccgaaacugggcu

SEQ ID NO: 11462 - RNA, 38 nt, Artificial Sequence
  Description of Artificial Sequence:  Enzymatic Nucleic Acid
acucugaacugaugaggccguuaggccgaaacgugggu

SEQ ID NO: 11463 - RNA, 38 nt, Artificial Sequence
  Description of Artificial Sequence:  Enzymatic Nucleic Acid
aacucugacugaugaggccguuaggccgaaaacguggg

SEQ ID NO: 11464 - RNA, 38 nt, Artificial Sequence
  Description of Artificial Sequence:  Enzymatic Nucleic Acid
caacucugcugaugaggccguuaggccgaaaaacgugg

SEQ ID NO: 11465 - RNA, 38 nt, Artificial Sequence
  Description of Artificial Sequence:  Enzymatic Nucleic Acid
ccaacucucugaugaggccguuaggccgaaaaaacgug

SEQ ID NO: 11466 - RNA, 38 nt, Artificial Sequence
  Description of Artificial Sequence:  Enzymatic Nucleic Acid
guuccacccugaugaggccguuaggccgaaacucugaa

SEQ ID NO: 11467 - RNA, 38 nt, Artificial Sequence
  Description of Artificial Sequence:  Enzymatic Nucleic Acid
auuucccacugaugaggccguuaggccgaaauguucca

SEQ ID NO: 11468 - RNA, 38 nt, Artificial Sequence
  Description of Artificial Sequence:  Enzymatic Nucleic Acid
gauuuccccugaugaggccguuaggccgaaaauguucc

SEQ ID NO: 11469 - RNA, 38 nt, Artificial Sequence
  Description of Artificial Sequence:  Enzymatic Nucleic Acid
uugcaagacugaugaggccguuaggccgaaauuuccca

SEQ ID NO: 11470 - RNA, 38 nt, Artificial Sequence
  Description of Artificial Sequence:  Enzymatic Nucleic Acid
gcuugcaacugaugaggccguuaggccgaaagauuucc

SEQ ID NO: 11471 - RNA, 38 nt, Artificial Sequence
  Description of Artificial Sequence:  Enzymatic Nucleic Acid
uagcuugccugaugaggccguuaggccgaaagagauuu

SEQ ID NO: 11472 - RNA, 38 nt, Artificial Sequence
  Description of Artificial Sequence:  Enzymatic Nucleic Acid
cugagcaucugaugaggccguuaggccgaaagcuugca

SEQ ID NO: 11473 - RNA, 38 nt, Artificial Sequence
  Description of Artificial Sequence:  Enzymatic Nucleic Acid
auccugcucugaugaggccguuaggccgaaagcauuag

SEQ ID NO: 11474 - RNA, 38 nt, Artificial Sequence
  Description of Artificial Sequence:  Enzymatic Nucleic Acid
gaacaaugcugaugaggccguuaggccgaaagucuuug

SEQ ID NO: 11475 - RNA, 38 nt, Artificial Sequence
  Description of Artificial Sequence:  Enzymatic Nucleic Acid
ggaagaaccugaugaggccguuaggccgaaauguaguc

SEQ ID NO: 11476 - RNA, 38 nt, Artificial Sequence
  Description of Artificial Sequence:  Enzymatic Nucleic Acid
aucggaagcugaugaggccguuaggccgaaacaaugua

SEQ ID NO: 11477 - RNA, 38 nt, Artificial Sequence
  Description of Artificial Sequence:  Enzymatic Nucleic Acid
uaucggaacugaugaggccguuaggccgaaaacaaugu

SEQ ID NO: 11478 - RNA, 38 nt, Artificial Sequence
  Description of Artificial Sequence:  Enzymatic Nucleic Acid
gauaucggcugaugaggccguuaggccgaaagaacaau

SEQ ID NO: 11479 - RNA, 38 nt, Artificial Sequence
  Description of Artificial Sequence:  Enzymatic Nucleic Acid
ugauaucgcugaugaggccguuaggccgaaaagaacaa

SEQ ID NO: 11480 - RNA, 38 nt, Artificial Sequence
  Description of Artificial Sequence:  Enzymatic Nucleic Acid
gucucugacugaugaggccguuaggccgaaaucggaag

SEQ ID NO: 11481 - RNA, 38 nt, Artificial Sequence
  Description of Artificial Sequence:  Enzymatic Nucleic Acid
aagucucucugaugaggccguuaggccgaaauaucgga

SEQ ID NO: 11482 - RNA, 38 nt, Artificial Sequence
  Description of Artificial Sequence:  Enzymatic Nucleic Acid
caugcucacugaugaggccguuaggccgaaagucucug

SEQ ID NO: 11483 - RNA, 38 nt, Artificial Sequence
  Description of Artificial Sequence:  Enzymatic Nucleic Acid
ccaugcuccugaugaggccguuaggccgaaaagucucu

SEQ ID NO: 11484 - RNA, 38 nt, Artificial Sequence
  Description of Artificial Sequence:  Enzymatic Nucleic Acid
gaguccagcugaugaggccguuaggccgaaauccucuu

SEQ ID NO: 11485 - RNA, 38 nt, Artificial Sequence
  Description of Artificial Sequence:  Enzymatic Nucleic Acid
agaguccacugaugaggccguuaggccgaaaauccucu

SEQ ID NO: 11486 - RNA, 38 nt, Artificial Sequence
  Description of Artificial Sequence:  Enzymatic Nucleic Acid
ggcagagacugaugaggccguuaggccgaaaguccaga

SEQ ID NO: 11487 - RNA, 38 nt, Artificial Sequence
  Description of Artificial Sequence:  Enzymatic Nucleic Acid
uaggcagacugaugaggccguuaggccgaaagagucca

SEQ ID NO: 11488 - RNA, 38 nt, Artificial Sequence
  Description of Artificial Sequence:  Enzymatic Nucleic Acid
gguaggcacugaugaggccguuaggccgaaagagaguc

SEQ ID NO: 11489 - RNA, 38 nt, Artificial Sequence
  Description of Artificial Sequence:  Enzymatic Nucleic Acid
aggugaggcugaugaggccguuaggccgaaaggcagag

SEQ ID NO: 11490 - RNA, 38 nt, Artificial Sequence
  Description of Artificial Sequence:  Enzymatic Nucleic Acid
aaacaggucugaugaggccguuaggccgaaagguaggc

SEQ ID NO: 11491 - RNA, 38 nt, Artificial Sequence
  Description of Artificial Sequence:  Enzymatic Nucleic Acid
auacaggacugaugaggccguuaggccgaaacagguga

SEQ ID NO: 11492 - RNA, 38 nt, Artificial Sequence
  Description of Artificial Sequence:  Enzymatic Nucleic Acid
cauacaggcugaugaggccguuaggccgaaaacaggug

SEQ ID NO: 11493 - RNA, 38 nt, Artificial Sequence
  Description of Artificial Sequence:  Enzymatic Nucleic Acid
ccauacagcugaugaggccguuaggccgaaaaacaggu

SEQ ID NO: 11494 - RNA, 38 nt, Artificial Sequence
  Description of Artificial Sequence:  Enzymatic Nucleic Acid
cuccuccacugaugaggccguuaggccgaaacaggaaa

SEQ ID NO: 11495 - RNA, 38 nt, Artificial Sequence
  Description of Artificial Sequence:  Enzymatic Nucleic Acid
gggucacacugaugaggccguuaggccgaaacuuccuc

SEQ ID NO: 11496 - RNA, 38 nt, Artificial Sequence
  Description of Artificial Sequence:  Enzymatic Nucleic Acid
cauaauggcugaugaggccguuaggccgaaauuugggg

SEQ ID NO: 11497 - RNA, 38 nt, Artificial Sequence
  Description of Artificial Sequence:  Enzymatic Nucleic Acid
ucauaaugcugaugaggccguuaggccgaaaauuuggg

SEQ ID NO: 11498 - RNA, 38 nt, Artificial Sequence
  Description of Artificial Sequence:  Enzymatic Nucleic Acid
guugucaucugaugaggccguuaggccgaaauggaauu

SEQ ID NO: 11499 - RNA, 38 nt, Artificial Sequence
  Description of Artificial Sequence:  Enzymatic Nucleic Acid
uguugucacugaugaggccguuaggccgaaaauggaau

SEQ ID NO: 11500 - RNA, 38 nt, Artificial Sequence
  Description of Artificial Sequence:  Enzymatic Nucleic Acid
uacugacucugaugaggccguuaggccgaaauuccugc

SEQ ID NO: 11501 - RNA, 38 nt, Artificial Sequence
  Description of Artificial Sequence:  Enzymatic Nucleic Acid
cagauacucugaugaggccguuaggccgaaacugauuc

SEQ ID NO: 11502 - RNA, 38 nt, Artificial Sequence
  Description of Artificial Sequence:  Enzymatic Nucleic Acid
ucugcagacugaugaggccguuaggccgaaacugacug

SEQ ID NO: 11503 - RNA, 38 nt, Artificial Sequence
  Description of Artificial Sequence:  Enzymatic Nucleic Acid
guucugcacugaugaggccguuaggccgaaauacugac

SEQ ID NO: 11504 - RNA, 38 nt, Artificial Sequence
  Description of Artificial Sequence:  Enzymatic Nucleic Acid
cuuucgcucugaugaggccguuaggccgaaacuguucu

SEQ ID NO: 11505 - RNA, 38 nt, Artificial Sequence
  Description of Artificial Sequence:  Enzymatic Nucleic Acid
aauguuuucugaugaggccguuaggccgaaacacucac

SEQ ID NO: 11506 - RNA, 38 nt, Artificial Sequence
  Description of Artificial Sequence:  Enzymatic Nucleic Acid
uaucuucacugaugaggccguuaggccgaaauguuuuu

SEQ ID NO: 11507 - RNA, 38 nt, Artificial Sequence
  Description of Artificial Sequence:  Enzymatic Nucleic Acid
auaucuuccugaugaggccguuaggccgaaaauguuuu

SEQ ID NO: 11508 - RNA, 38 nt, Artificial Sequence
  Description of Artificial Sequence:  Enzymatic Nucleic Acid
uaacgggacugaugaggccguuaggccgaaaucuucaa

SEQ ID NO: 11509 - RNA, 38 nt, Artificial Sequence
  Description of Artificial Sequence:  Enzymatic Nucleic Acid
ucuaacggcugaugaggccguuaggccgaaauaucuuc

SEQ ID NO: 11510 - RNA, 38 nt, Artificial Sequence
  Description of Artificial Sequence:  Enzymatic Nucleic Acid
guucuucucugaugaggccguuaggccgaaacgggaua

SEQ ID NO: 11511 - RNA, 38 nt, Artificial Sequence
  Description of Artificial Sequence:  Enzymatic Nucleic Acid
gguucuuccugaugaggccguuaggccgaaaacgggau

SEQ ID NO: 11512 - RNA, 38 nt, Artificial Sequence
  Description of Artificial Sequence:  Enzymatic Nucleic Acid
auuacuuucugaugaggccguuaggccgaaacuucugg

SEQ ID NO: 11513 - RNA, 38 nt, Artificial Sequence
  Description of Artificial Sequence:  Enzymatic Nucleic Acid
ucugggaucugaugaggccguuaggccgaaacuuuuac

SEQ ID NO: 11514 - RNA, 38 nt, Artificial Sequence
  Description of Artificial Sequence:  Enzymatic Nucleic Acid
ucaucuggcugaugaggccguuaggccgaaauuacuuu

SEQ ID NO: 11515 - RNA, 38 nt, Artificial Sequence
  Description of Artificial Sequence:  Enzymatic Nucleic Acid
aagaaccacugaugaggccguuaggccgaaaccacugu

SEQ ID NO: 11516 - RNA, 38 nt, Artificial Sequence
  Description of Artificial Sequence:  Enzymatic Nucleic Acid
gaggcaagcugaugaggccguuaggccgaaaccauacc

SEQ ID NO: 11517 - RNA, 38 nt, Artificial Sequence
  Description of Artificial Sequence:  Enzymatic Nucleic Acid
ugaggcaacugaugaggccguuaggccgaaaaccauac

SEQ ID NO: 11518 - RNA, 38 nt, Artificial Sequence
  Description of Artificial Sequence:  Enzymatic Nucleic Acid
ucugaggccugaugaggccguuaggccgaaagaaccau

SEQ ID NO: 11519 - RNA, 38 nt, Artificial Sequence
  Description of Artificial Sequence:  Enzymatic Nucleic Acid
gcucuucucugaugaggccguuaggccgaaaggcaaga

SEQ ID NO: 11520 - RNA, 38 nt, Artificial Sequence
  Description of Artificial Sequence:  Enzymatic Nucleic Acid
gucuuccacugaugaggccguuaggccgaaaguuuuca

SEQ ID NO: 11521 - RNA, 38 nt, Artificial Sequence
  Description of Artificial Sequence:  Enzymatic Nucleic Acid
ugucuucccugaugaggccguuaggccgaaaaguuuuc

SEQ ID NO: 11522 - RNA, 38 nt, Artificial Sequence
  Description of Artificial Sequence:  Enzymatic Nucleic Acid
auggagaucugaugaggccguuaggccgaaauuugguu

SEQ ID NO: 11523 - RNA, 38 nt, Artificial Sequence
  Description of Artificial Sequence:  Enzymatic Nucleic Acid
gauggagacugaugaggccguuaggccgaaaauuuggu

SEQ ID NO: 11524 - RNA, 38 nt, Artificial Sequence
  Description of Artificial Sequence:  Enzymatic Nucleic Acid
aagauggacugaugaggccguuaggccgaaauaauuug

SEQ ID NO: 11525 - RNA, 38 nt, Artificial Sequence
  Description of Artificial Sequence:  Enzymatic Nucleic Acid
aaaagaugcugaugaggccguuaggccgaaagauaauu

SEQ ID NO: 11526 - RNA, 38 nt, Artificial Sequence
  Description of Artificial Sequence:  Enzymatic Nucleic Acid
caccaaaacugaugaggccguuaggccgaaauggagau

SEQ ID NO: 11527 - RNA, 38 nt, Artificial Sequence
  Description of Artificial Sequence:  Enzymatic Nucleic Acid
uccaccaacugaugaggccguuaggccgaaagauggag

SEQ ID NO: 11528 - RNA, 38 nt, Artificial Sequence
  Description of Artificial Sequence:  Enzymatic Nucleic Acid
uuccaccacugaugaggccguuaggccgaaaagaugga

SEQ ID NO: 11529 - RNA, 38 nt, Artificial Sequence
  Description of Artificial Sequence:  Enzymatic Nucleic Acid
auuccacccugaugaggccguuaggccgaaaaagaugg

SEQ ID NO: 11530 - RNA, 38 nt, Artificial Sequence
  Description of Artificial Sequence:  Enzymatic Nucleic Acid
augccacacugaugaggccguuaggccgaaacucccug

SEQ ID NO: 11531 - RNA, 38 nt, Artificial Sequence
  Description of Artificial Sequence:  Enzymatic Nucleic Acid
agccuucacugaugaggccguuaggccgaaaugccaca

SEQ ID NO: 11532 - RNA, 38 nt, Artificial Sequence
  Description of Artificial Sequence:  Enzymatic Nucleic Acid
ucugguuucugaugaggccguuaggccgaaagccuuca

SEQ ID NO: 11533 - RNA, 38 nt, Artificial Sequence
  Description of Artificial Sequence:  Enzymatic Nucleic Acid
cggacuggcugaugaggccguuaggccgaaagccgcuu

SEQ ID NO: 11534 - RNA, 38 nt, Artificial Sequence
  Description of Artificial Sequence:  Enzymatic Nucleic Acid
gauauccgcugaugaggccguuaggccgaaacugguag

SEQ ID NO: 11535 - RNA, 38 nt, Artificial Sequence
  Description of Artificial Sequence:  Enzymatic Nucleic Acid
cggagugacugaugaggccguuaggccgaaauccggac

SEQ ID NO: 11536 - RNA, 38 nt, Artificial Sequence
  Description of Artificial Sequence:  Enzymatic Nucleic Acid
aucggagucugaugaggccguuaggccgaaauauccgg

SEQ ID NO: 11537 - RNA, 38 nt, Artificial Sequence
  Description of Artificial Sequence:  Enzymatic Nucleic Acid
ugucaucgcugaugaggccguuaggccgaaagugauau

SEQ ID NO: 11538 - RNA, 38 nt, Artificial Sequence
  Description of Artificial Sequence:  Enzymatic Nucleic Acid
cacuggagcugaugaggccguuaggccgaaacacggug

SEQ ID NO: 11539 - RNA, 38 nt, Artificial Sequence
  Description of Artificial Sequence:  Enzymatic Nucleic Acid
ccucacugcugaugaggccguuaggccgaaaguacacg

SEQ ID NO: 11540 - RNA, 38 nt, Artificial Sequence
  Description of Artificial Sequence:  Enzymatic Nucleic Acid
agcuuuaacugaugaggccguuaggccgaaaguucugc

SEQ ID NO: 11541 - RNA, 38 nt, Artificial Sequence
  Description of Artificial Sequence:  Enzymatic Nucleic Acid
cagcuuuacugaugaggccguuaggccgaaaaguucug

SEQ ID NO: 11542 - RNA, 38 nt, Artificial Sequence
  Description of Artificial Sequence:  Enzymatic Nucleic Acid
ucagcuuucugaugaggccguuaggccgaaaaaguucu

SEQ ID NO: 11543 - RNA, 38 nt, Artificial Sequence
  Description of Artificial Sequence:  Enzymatic Nucleic Acid
aucagcuucugaugaggccguuaggccgaaaaaaguuc

SEQ ID NO: 11544 - RNA, 38 nt, Artificial Sequence
  Description of Artificial Sequence:  Enzymatic Nucleic Acid
ccaaucuccugaugaggccguuaggccgaaaucagcuu

SEQ ID NO: 11545 - RNA, 38 nt, Artificial Sequence
  Description of Artificial Sequence:  Enzymatic Nucleic Acid
ugcacucccugaugaggccguuaggccgaaaucucuau

SEQ ID NO: 11546 - RNA, 38 nt, Artificial Sequence
  Description of Artificial Sequence:  Enzymatic Nucleic Acid
ggcugugccugaugaggccguuaggccgaaaccgguuu

SEQ ID NO: 11547 - RNA, 38 nt, Artificial Sequence
  Description of Artificial Sequence:  Enzymatic Nucleic Acid
ggcuggagcugaugaggccguuaggccgaaaucugggc

SEQ ID NO: 11548 - RNA, 38 nt, Artificial Sequence
  Description of Artificial Sequence:  Enzymatic Nucleic Acid
aggcuggacugaugaggccguuaggccgaaaaucuggg

SEQ ID NO: 11549 - RNA, 38 nt, Artificial Sequence
  Description of Artificial Sequence:  Enzymatic Nucleic Acid
ucaggcugcugaugaggccguuaggccgaaagaaucug

SEQ ID NO: 11550 - RNA, 38 nt, Artificial Sequence
  Description of Artificial Sequence:  Enzymatic Nucleic Acid
caggaggacugaugaggccguuaggccgaaagcucagu

SEQ ID NO: 11551 - RNA, 38 nt, Artificial Sequence
  Description of Artificial Sequence:  Enzymatic Nucleic Acid
aacaggagcugaugaggccguuaggccgaaagagcuca

SEQ ID NO: 11552 - RNA, 38 nt, Artificial Sequence
  Description of Artificial Sequence:  Enzymatic Nucleic Acid
uuaaacagcugaugaggccguuaggccgaaaggagagc

SEQ ID NO: 11553 - RNA, 38 nt, Artificial Sequence
  Description of Artificial Sequence:  Enzymatic Nucleic Acid
uccuuuuacugaugaggccguuaggccgaaacaggagg

SEQ ID NO: 11554 - RNA, 38 nt, Artificial Sequence
  Description of Artificial Sequence:  Enzymatic Nucleic Acid
uuccuuuucugaugaggccguuaggccgaaaacaggag

SEQ ID NO: 11555 - RNA, 38 nt, Artificial Sequence
  Description of Artificial Sequence:  Enzymatic Nucleic Acid
cuuccuuucugaugaggccguuaggccgaaaaacagga

SEQ ID NO: 11556 - RNA, 38 nt, Artificial Sequence
  Description of Artificial Sequence:  Enzymatic Nucleic Acid
ggggugugcugaugaggccguuaggccgaaaugcuucc

SEQ ID NO: 11557 - RNA, 38 nt, Artificial Sequence
  Description of Artificial Sequence:  Enzymatic Nucleic Acid
auguccggcugaugaggccguuaggccgaaaguugggg

SEQ ID NO: 11558 - RNA, 38 nt, Artificial Sequence
  Description of Artificial Sequence:  Enzymatic Nucleic Acid
ucucaugucugaugaggccguuaggccgaaauguccgg

SEQ ID NO: 11559 - RNA, 38 nt, Artificial Sequence
  Description of Artificial Sequence:  Enzymatic Nucleic Acid
ucugagcacugaugaggccguuaggccgaaaccucuca

SEQ ID NO: 11560 - RNA, 38 nt, Artificial Sequence
  Description of Artificial Sequence:  Enzymatic Nucleic Acid
caaaaucucugaugaggccguuaggccgaaagcagacc

SEQ ID NO: 11561 - RNA, 38 nt, Artificial Sequence
  Description of Artificial Sequence:  Enzymatic Nucleic Acid
cacuucaacugaugaggccguuaggccgaaaucugagc

SEQ ID NO: 11562 - RNA, 38 nt, Artificial Sequence
  Description of Artificial Sequence:  Enzymatic Nucleic Acid
acacuucacugaugaggccguuaggccgaaaaucugag

SEQ ID NO: 11563 - RNA, 38 nt, Artificial Sequence
  Description of Artificial Sequence:  Enzymatic Nucleic Acid
aacacuuccugaugaggccguuaggccgaaaaaucuga

SEQ ID NO: 11564 - RNA, 38 nt, Artificial Sequence
  Description of Artificial Sequence:  Enzymatic Nucleic Acid
gaaagaaccugaugaggccguuaggccgaaacacuuca

SEQ ID NO: 11565 - RNA, 38 nt, Artificial Sequence
  Description of Artificial Sequence:  Enzymatic Nucleic Acid
guggaaagcugaugaggccguuaggccgaaacaacacu

SEQ ID NO: 11566 - RNA, 38 nt, Artificial Sequence
  Description of Artificial Sequence:  Enzymatic Nucleic Acid
gguggaaacugaugaggccguuaggccgaaaacaacac

SEQ ID NO: 11567 - RNA, 38 nt, Artificial Sequence
  Description of Artificial Sequence:  Enzymatic Nucleic Acid
cugguggacugaugaggccguuaggccgaaagaacaac

SEQ ID NO: 11568 - RNA, 38 nt, Artificial Sequence
  Description of Artificial Sequence:  Enzymatic Nucleic Acid
gcugguggcugaugaggccguuaggccgaaaagaacaa

SEQ ID NO: 11569 - RNA, 38 nt, Artificial Sequence
  Description of Artificial Sequence:  Enzymatic Nucleic Acid
ugcuggugcugaugaggccguuaggccgaaaaagaaca

SEQ ID NO: 11570 - RNA, 38 nt, Artificial Sequence
  Description of Artificial Sequence:  Enzymatic Nucleic Acid
aaugcggccugaugaggccguuaggccgaaacuuccug

SEQ ID NO: 11571 - RNA, 38 nt, Artificial Sequence
  Description of Artificial Sequence:  Enzymatic Nucleic Acid
gaaaaucacugaugaggccguuaggccgaaaugcggcu

SEQ ID NO: 11572 - RNA, 38 nt, Artificial Sequence
  Description of Artificial Sequence:  Enzymatic Nucleic Acid
ugaaaauccugaugaggccguuaggccgaaaaugcggc

SEQ ID NO: 11573 - RNA, 38 nt, Artificial Sequence
  Description of Artificial Sequence:  Enzymatic Nucleic Acid
gaaaugaacugaugaggccguuaggccgaaaucaaaug

SEQ ID NO: 11574 - RNA, 38 nt, Artificial Sequence
  Description of Artificial Sequence:  Enzymatic Nucleic Acid
cgaaaugacugaugaggccguuaggccgaaaaucaaau

SEQ ID NO: 11575 - RNA, 38 nt, Artificial Sequence
  Description of Artificial Sequence:  Enzymatic Nucleic Acid
ucgaaaugcugaugaggccguuaggccgaaaaaucaaa

SEQ ID NO: 11576 - RNA, 38 nt, Artificial Sequence
  Description of Artificial Sequence:  Enzymatic Nucleic Acid
gucgaaaucugaugaggccguuaggccgaaaaaaucaa

SEQ ID NO: 11577 - RNA, 38 nt, Artificial Sequence
  Description of Artificial Sequence:  Enzymatic Nucleic Acid
guugucgacugaugaggccguuaggccgaaaugaaaau

SEQ ID NO: 11578 - RNA, 38 nt, Artificial Sequence
  Description of Artificial Sequence:  Enzymatic Nucleic Acid
uguugucgcugaugaggccguuaggccgaaaaugaaaa

SEQ ID NO: 11579 - RNA, 38 nt, Artificial Sequence
  Description of Artificial Sequence:  Enzymatic Nucleic Acid
cuguuguccugaugaggccguuaggccgaaaaaugaaa

SEQ ID NO: 11580 - RNA, 38 nt, Artificial Sequence
  Description of Artificial Sequence:  Enzymatic Nucleic Acid
ugcagucccugaugaggccguuaggccgaaagguccuu

SEQ ID NO: 11581 - RNA, 38 nt, Artificial Sequence
  Description of Artificial Sequence:  Enzymatic Nucleic Acid
gccuagaacugaugaggccguuaggccgaaagcuggcu

SEQ ID NO: 11582 - RNA, 38 nt, Artificial Sequence
  Description of Artificial Sequence:  Enzymatic Nucleic Acid
aagccuagcugaugaggccguuaggccgaaagagcugg

SEQ ID NO: 11583 - RNA, 38 nt, Artificial Sequence
  Description of Artificial Sequence:  Enzymatic Nucleic Acid
caagccuacugaugaggccguuaggccgaaaagagcug

SEQ ID NO: 11584 - RNA, 38 nt, Artificial Sequence
  Description of Artificial Sequence:  Enzymatic Nucleic Acid
cacaagcccugaugaggccguuaggccgaaagaagagc

SEQ ID NO: 11585 - RNA, 54 nt, Artificial Sequence
  Description of Artificial Sequence:  Enzymatic Nucleic Acid
cgacggccagaagcaccuaccagagaaacacacguugugguacauuaccuggua

SEQ ID NO: 11586 - RNA, 54 nt, Artificial Sequence
  Description of Artificial Sequence:  Enzymatic Nucleic Acid
cacagggcagaagccagcaccagagaaacacacguugugguacauuaccuggua

SEQ ID NO: 11587 - RNA, 54 nt, Artificial Sequence
  Description of Artificial Sequence:  Enzymatic Nucleic Acid
cccacagaagaagcccggaccagagaaacacacguugugguacauuaccuggua

SEQ ID NO: 11588 - RNA, 54 nt, Artificial Sequence
  Description of Artificial Sequence:  Enzymatic Nucleic Acid
ugagccugagaagaucaaaccagagaaacacacguugugguacauuaccuggua

SEQ ID NO: 11589 - RNA, 54 nt, Artificial Sequence
  Description of Artificial Sequence:  Enzymatic Nucleic Acid
gaggccaaagaaguuuccaccagagaaacacacguugugguacauuaccuggua

SEQ ID NO: 11590 - RNA, 54 nt, Artificial Sequence
  Description of Artificial Sequence:  Enzymatic Nucleic Acid
aaauggagagaaguaaucaccagagaaacacacguugugguacauuaccuggua

SEQ ID NO: 11591 - RNA, 54 nt, Artificial Sequence
  Description of Artificial Sequence:  Enzymatic Nucleic Acid
cuguuaccagaaggaacaaccagagaaacacacguugugguacauuaccuggua

SEQ ID NO: 11592 - RNA, 54 nt, Artificial Sequence
  Description of Artificial Sequence:  Enzymatic Nucleic Acid
acauaauaagaagguaacaccagagaaacacacguugugguacauuaccuggua

SEQ ID NO: 11593 - RNA, 54 nt, Artificial Sequence
  Description of Artificial Sequence:  Enzymatic Nucleic Acid
uuccaugaagaagacucaaccagagaaacacacguugugguacauuaccuggua

SEQ ID NO: 11594 - RNA, 54 nt, Artificial Sequence
  Description of Artificial Sequence:  Enzymatic Nucleic Acid
uuuucuccagaagauaguaccagagaaacacacguugugguacauuaccuggua

SEQ ID NO: 11595 - RNA, 54 nt, Artificial Sequence
  Description of Artificial Sequence:  Enzymatic Nucleic Acid
cacucccaagaaggguuuaccagagaaacacacguugugguacauuaccuggua

SEQ ID NO: 11596 - RNA, 54 nt, Artificial Sequence
  Description of Artificial Sequence:  Enzymatic Nucleic Acid
ucuuggucagaagcccacaccagagaaacacacguugugguacauuaccuggua

SEQ ID NO: 11597 - RNA, 54 nt, Artificial Sequence
  Description of Artificial Sequence:  Enzymatic Nucleic Acid
ccauaaucagaaguacauaccagagaaacacacguugugguacauuaccuggua

SEQ ID NO: 11598 - RNA, 54 nt, Artificial Sequence
  Description of Artificial Sequence:  Enzymatic Nucleic Acid
ucucaccaagaaggggugaccagagaaacacacguugugguacauuaccuggua

SEQ ID NO: 11599 - RNA, 54 nt, Artificial Sequence
  Description of Artificial Sequence:  Enzymatic Nucleic Acid
auggcauaagaaguacauaccagagaaacacacguugugguacauuaccuggua

SEQ ID NO: 11600 - RNA, 54 nt, Artificial Sequence
  Description of Artificial Sequence:  Enzymatic Nucleic Acid
cuuccuccagaagccaauaccagagaaacacacguugugguacauuaccuggua

SEQ ID NO: 11601 - RNA, 54 nt, Artificial Sequence
  Description of Artificial Sequence:  Enzymatic Nucleic Acid
gucacugaagaagcuuggaccagagaaacacacguugugguacauuaccuggua

SEQ ID NO: 11602 - RNA, 54 nt, Artificial Sequence
  Description of Artificial Sequence:  Enzymatic Nucleic Acid
uuguacaaagaagacacaaccagagaaacacacguugugguacauuaccuggua

SEQ ID NO: 11603 - RNA, 54 nt, Artificial Sequence
  Description of Artificial Sequence:  Enzymatic Nucleic Acid
gcucagugagaagcauguaccagagaaacacacguugugguacauuaccuggua

SEQ ID NO: 11604 - RNA, 54 nt, Artificial Sequence
  Description of Artificial Sequence:  Enzymatic Nucleic Acid
aaacguagagaagucugcaccagagaaacacacguugugguacauuaccuggua

SEQ ID NO: 11605 - RNA, 54 nt, Artificial Sequence
  Description of Artificial Sequence:  Enzymatic Nucleic Acid
uuggcagaagaagugggcaccagagaaacacacguugugguacauuaccuggua

SEQ ID NO: 11606 - RNA, 54 nt, Artificial Sequence
  Description of Artificial Sequence:  Enzymatic Nucleic Acid
uucuugcaagaaggugugaccagagaaacacacguugugguacauuaccuggua

SEQ ID NO: 11607 - RNA, 54 nt, Artificial Sequence
  Description of Artificial Sequence:  Enzymatic Nucleic Acid
uugagcaaagaagacauaaccagagaaacacacguugugguacauuaccuggua

SEQ ID NO: 11608 - RNA, 54 nt, Artificial Sequence
  Description of Artificial Sequence:  Enzymatic Nucleic Acid
ggacugugagaagccugaaccagagaaacacacguugugguacauuaccuggua

SEQ ID NO: 11609 - RNA, 54 nt, Artificial Sequence
  Description of Artificial Sequence:  Enzymatic Nucleic Acid
cgcucuagagaagugagcaccagagaaacacacguugugguacauuaccuggua

SEQ ID NO: 11610 - RNA, 54 nt, Artificial Sequence
  Description of Artificial Sequence:  Enzymatic Nucleic Acid
uacuugucagaagauucuaccagagaaacacacguugugguacauuaccuggua

SEQ ID NO: 11611 - RNA, 54 nt, Artificial Sequence
  Description of Artificial Sequence:  Enzymatic Nucleic Acid
accacaugagaaguggagaccagagaaacacacguugugguacauuaccuggua

SEQ ID NO: 11612 - RNA, 54 nt, Artificial Sequence
  Description of Artificial Sequence:  Enzymatic Nucleic Acid
gggaguucagaaggauccaccagagaaacacacguugugguacauuaccuggua

SEQ ID NO: 11613 - RNA, 54 nt, Artificial Sequence
  Description of Artificial Sequence:  Enzymatic Nucleic Acid
caucauaaagaagucguuaccagagaaacacacguugugguacauuaccuggua

SEQ ID NO: 11614 - RNA, 54 nt, Artificial Sequence
  Description of Artificial Sequence:  Enzymatic Nucleic Acid
cuagguucagaaggucucaccagagaaacacacguugugguacauuaccuggua

SEQ ID NO: 11615 - RNA, 54 nt, Artificial Sequence
  Description of Artificial Sequence:  Enzymatic Nucleic Acid
ccaaaggcagaagcuucaaccagagaaacacacguugugguacauuaccuggua

SEQ ID NO: 11616 - RNA, 54 nt, Artificial Sequence
  Description of Artificial Sequence:  Enzymatic Nucleic Acid
gguaagugagaagguuucaccagagaaacacacguugugguacauuaccuggua

SEQ ID NO: 11617 - RNA, 54 nt, Artificial Sequence
  Description of Artificial Sequence:  Enzymatic Nucleic Acid
aaauccagagaaggcugaaccagagaaacacacguugugguacauuaccuggua

SEQ ID NO: 11618 - RNA, 54 nt, Artificial Sequence
  Description of Artificial Sequence:  Enzymatic Nucleic Acid
gcuccaagagaaggaaguaccagagaaacacacguugugguacauuaccuggua

SEQ ID NO: 11619 - RNA, 54 nt, Artificial Sequence
  Description of Artificial Sequence:  Enzymatic Nucleic Acid
cacuuggaagaaguaacaaccagagaaacacacguugugguacauuaccuggua

SEQ ID NO: 11620 - RNA, 54 nt, Artificial Sequence
  Description of Artificial Sequence:  Enzymatic Nucleic Acid
cugacauaagaaggaucuaccagagaaacacacguugugguacauuaccuggua

SEQ ID NO: 11621 - RNA, 54 nt, Artificial Sequence
  Description of Artificial Sequence:  Enzymatic Nucleic Acid
guaguauaagaaggggccaccagagaaacacacguugugguacauuaccuggua

SEQ ID NO: 11622 - RNA, 54 nt, Artificial Sequence
  Description of Artificial Sequence:  Enzymatic Nucleic Acid
ccagcaugagaagguacaaccagagaaacacacguugugguacauuaccuggua

SEQ ID NO: 11623 - RNA, 54 nt, Artificial Sequence
  Description of Artificial Sequence:  Enzymatic Nucleic Acid
cccgugccagaaguccagaccagagaaacacacguugugguacauuaccuggua

SEQ ID NO: 11624 - RNA, 54 nt, Artificial Sequence
  Description of Artificial Sequence:  Enzymatic Nucleic Acid
gugagguaagaagagagaaccagagaaacacacguugugguacauuaccuggua

SEQ ID NO: 11625 - RNA, 54 nt, Artificial Sequence
  Description of Artificial Sequence:  Enzymatic Nucleic Acid
auacaggaagaaggugagaccagagaaacacacguugugguacauuaccuggua

SEQ ID NO: 11626 - RNA, 54 nt, Artificial Sequence
  Description of Artificial Sequence:  Enzymatic Nucleic Acid
cacucacaagaaggcucuaccagagaaacacacguugugguacauuaccuggua

SEQ ID NO: 11627 - RNA, 54 nt, Artificial Sequence
  Description of Artificial Sequence:  Enzymatic Nucleic Acid
ugguugucagaagggauuaccagagaaacacacguugugguacauuaccuggua

SEQ ID NO: 11628 - RNA, 54 nt, Artificial Sequence
  Description of Artificial Sequence:  Enzymatic Nucleic Acid
cacuguccagaagguuguaccagagaaacacacguugugguacauuaccuggua

SEQ ID NO: 11629 - RNA, 54 nt, Artificial Sequence
  Description of Artificial Sequence:  Enzymatic Nucleic Acid
gauauccgagaagguagcaccagagaaacacacguugugguacauuaccuggua

SEQ ID NO: 11630 - RNA, 54 nt, Artificial Sequence
  Description of Artificial Sequence:  Enzymatic Nucleic Acid
ucugugucagaagagugaaccagagaaacacacguugugguacauuaccuggua

SEQ ID NO: 11631 - RNA, 54 nt, Artificial Sequence
  Description of Artificial Sequence:  Enzymatic Nucleic Acid
agaaucugagaagugcuaaccagagaaacacacguugugguacauuaccuggua

SEQ ID NO: 11632 - RNA, 54 nt, Artificial Sequence
  Description of Artificial Sequence:  Enzymatic Nucleic Acid
gcuggagaagaagggcugaccagagaaacacacguugugguacauuaccuggua

SEQ ID NO: 11633 - RNA, 54 nt, Artificial Sequence
  Description of Artificial Sequence:  Enzymatic Nucleic Acid
ccgugucaagaaggagaaaccagagaaacacacguugugguacauuaccuggua

SEQ ID NO: 11634 - RNA, 54 nt, Artificial Sequence
  Description of Artificial Sequence:  Enzymatic Nucleic Acid
uccuuuuaagaaggaggaaccagagaaacacacguugugguacauuaccuggua

SEQ ID NO: 11635 - RNA, 54 nt, Artificial Sequence
  Description of Artificial Sequence:  Enzymatic Nucleic Acid
aaaaucugagaagaccucaccagagaaacacacguugugguacauuaccuggua

SEQ ID NO: 11636 - RNA, 54 nt, Artificial Sequence
  Description of Artificial Sequence:  Enzymatic Nucleic Acid
acuucaaaagaagagcagaccagagaaacacacguugugguacauuaccuggua

SEQ ID NO: 11637 - RNA, 54 nt, Artificial Sequence
  Description of Artificial Sequence:  Enzymatic Nucleic Acid
ucccugcaagaagaggucaccagagaaacacacguugugguacauuaccuggua

SEQ ID NO: 11638 - RNA, 54 nt, Artificial Sequence
  Description of Artificial Sequence:  Enzymatic Nucleic Acid
ccuagaagagaaggcuccaccagagaaacacacguugugguacauuaccuggua

SEQ ID NO: 11639 - RNA, 38 nt, Artificial Sequence
  Description of Artificial Sequence:  Enzymatic Nucleic Acid
ccguaccccugaugaggccguuaggccgaaauucgccc

SEQ ID NO: 11640 - RNA, 38 nt, Artificial Sequence
  Description of Artificial Sequence:  Enzymatic Nucleic Acid
gggucccgcugaugaggccguuaggccgaaacccaauu

SEQ ID NO: 11641 - RNA, 38 nt, Artificial Sequence
  Description of Artificial Sequence:  Enzymatic Nucleic Acid
ucgaccuccugaugaggccguuaggccgaaaggggggu

SEQ ID NO: 11642 - RNA, 38 nt, Artificial Sequence
  Description of Artificial Sequence:  Enzymatic Nucleic Acid
auaccguccugaugaggccguuaggccgaaaccucgag

SEQ ID NO: 11643 - RNA, 38 nt, Artificial Sequence
  Description of Artificial Sequence:  Enzymatic Nucleic Acid
cuuaucgacugaugaggccguuaggccgaaaccgucga

SEQ ID NO: 11644 - RNA, 38 nt, Artificial Sequence
  Description of Artificial Sequence:  Enzymatic Nucleic Acid
agcuuauccugaugaggccguuaggccgaaauaccguc

SEQ ID NO: 11645 - RNA, 38 nt, Artificial Sequence
  Description of Artificial Sequence:  Enzymatic Nucleic Acid
aucaagcucugaugaggccguuaggccgaaaucgauac

SEQ ID NO: 11646 - RNA, 38 nt, Artificial Sequence
  Description of Artificial Sequence:  Enzymatic Nucleic Acid
ucgauauccugaugaggccguuaggccgaaagcuuauc

SEQ ID NO: 11647 - RNA, 38 nt, Artificial Sequence
  Description of Artificial Sequence:  Enzymatic Nucleic Acid
gaauucgacugaugaggccguuaggccgaaaucaagcu

SEQ ID NO: 11648 - RNA, 38 nt, Artificial Sequence
  Description of Artificial Sequence:  Enzymatic Nucleic Acid
ccgaauuccugaugaggccguuaggccgaaauaucaag

SEQ ID NO: 11649 - RNA, 38 nt, Artificial Sequence
  Description of Artificial Sequence:  Enzymatic Nucleic Acid
ugggcccgcugaugaggccguuaggccgaaauucgaua

SEQ ID NO: 11650 - RNA, 38 nt, Artificial Sequence
  Description of Artificial Sequence:  Enzymatic Nucleic Acid
cugggccccugaugaggccguuaggccgaaaauucgau

SEQ ID NO: 11651 - RNA, 38 nt, Artificial Sequence
  Description of Artificial Sequence:  Enzymatic Nucleic Acid
ggcugcggcugaugaggccguuaggccgaaacacaguc

SEQ ID NO: 11652 - RNA, 38 nt, Artificial Sequence
  Description of Artificial Sequence:  Enzymatic Nucleic Acid
agccaggucugaugaggccguuaggccgaaaucccggc

SEQ ID NO: 11653 - RNA, 38 nt, Artificial Sequence
  Description of Artificial Sequence:  Enzymatic Nucleic Acid
guccgcggcugaugaggccguuaggccgaaaucggguc

SEQ ID NO: 11654 - RNA, 38 nt, Artificial Sequence
  Description of Artificial Sequence:  Enzymatic Nucleic Acid
uguccgcgcugaugaggccguuaggccgaaaaucgggu

SEQ ID NO: 11655 - RNA, 38 nt, Artificial Sequence
  Description of Artificial Sequence:  Enzymatic Nucleic Acid
accggggacugaugaggccguuaggccgaaagcgcggg

SEQ ID NO: 11656 - RNA, 38 nt, Artificial Sequence
  Description of Artificial Sequence:  Enzymatic Nucleic Acid
agaccgggcugaugaggccguuaggccgaaagagcgcg

SEQ ID NO: 11657 - RNA, 38 nt, Artificial Sequence
  Description of Artificial Sequence:  Enzymatic Nucleic Acid
cagcgcaacugaugaggccguuaggccgaaaccgggga

SEQ ID NO: 11658 - RNA, 38 nt, Artificial Sequence
  Description of Artificial Sequence:  Enzymatic Nucleic Acid
cgcagcgccugaugaggccguuaggccgaaagaccggg

SEQ ID NO: 11659 - RNA, 38 nt, Artificial Sequence
  Description of Artificial Sequence:  Enzymatic Nucleic Acid
agaggcggcugaugaggccguuaggccgaaauggcccc

SEQ ID NO: 11660 - RNA, 38 nt, Artificial Sequence
  Description of Artificial Sequence:  Enzymatic Nucleic Acid
aagucacacugaugaggccguuaggccgaaaggcggua

SEQ ID NO: 11661 - RNA, 38 nt, Artificial Sequence
  Description of Artificial Sequence:  Enzymatic Nucleic Acid
ccgcaaagcugaugaggccguuaggccgaaagucacag

SEQ ID NO: 11662 - RNA, 38 nt, Artificial Sequence
  Description of Artificial Sequence:  Enzymatic Nucleic Acid
cccgcaaacugaugaggccguuaggccgaaaagucaca

SEQ ID NO: 11663 - RNA, 38 nt, Artificial Sequence
  Description of Artificial Sequence:  Enzymatic Nucleic Acid
ggcccgcacugaugaggccguuaggccgaaagaaguca

SEQ ID NO: 11664 - RNA, 38 nt, Artificial Sequence
  Description of Artificial Sequence:  Enzymatic Nucleic Acid
uggcccgccugaugaggccguuaggccgaaaagaaguc

SEQ ID NO: 11665 - RNA, 38 nt, Artificial Sequence
  Description of Artificial Sequence:  Enzymatic Nucleic Acid
caggcacacugaugaggccguuaggccgaaacuccuuc

SEQ ID NO: 11666 - RNA, 38 nt, Artificial Sequence
  Description of Artificial Sequence:  Enzymatic Nucleic Acid
ugggcacacugaugaggccguuaggccgaaagcccagu

SEQ ID NO: 11667 - RNA, 38 nt, Artificial Sequence
  Description of Artificial Sequence:  Enzymatic Nucleic Acid
gcgacagccugaugaggccguuaggccgaaagcagcgc

SEQ ID NO: 11668 - RNA, 38 nt, Artificial Sequence
  Description of Artificial Sequence:  Enzymatic Nucleic Acid
cacagagccugaugaggccguuaggccgaaacagcuag

SEQ ID NO: 11669 - RNA, 38 nt, Artificial Sequence
  Description of Artificial Sequence:  Enzymatic Nucleic Acid
gaaccacacugaugaggccguuaggccgaaagcgacag

SEQ ID NO: 11670 - RNA, 38 nt, Artificial Sequence
  Description of Artificial Sequence:  Enzymatic Nucleic Acid
ccacgcagcugaugaggccguuaggccgaaaccacaga

SEQ ID NO: 11671 - RNA, 38 nt, Artificial Sequence
  Description of Artificial Sequence:  Enzymatic Nucleic Acid
uccacgcacugaugaggccguuaggccgaaaaccacag

SEQ ID NO: 11672 - RNA, 38 nt, Artificial Sequence
  Description of Artificial Sequence:  Enzymatic Nucleic Acid
aacccacacugaugaggccguuaggccgaaaggcggcu

SEQ ID NO: 11673 - RNA, 38 nt, Artificial Sequence
  Description of Artificial Sequence:  Enzymatic Nucleic Acid
gccagucacugaugaggccguuaggccgaaacccacag

SEQ ID NO: 11674 - RNA, 38 nt, Artificial Sequence
  Description of Artificial Sequence:  Enzymatic Nucleic Acid
cgccaguccugaugaggccguuaggccgaaaacccaca

SEQ ID NO: 11675 - RNA, 38 nt, Artificial Sequence
  Description of Artificial Sequence:  Enzymatic Nucleic Acid
auggagaacugaugaggccguuaggccgaaaucgccag

SEQ ID NO: 11676 - RNA, 38 nt, Artificial Sequence
  Description of Artificial Sequence:  Enzymatic Nucleic Acid
gauggagacugaugaggccguuaggccgaaaaucgcca

SEQ ID NO: 11677 - RNA, 38 nt, Artificial Sequence
  Description of Artificial Sequence:  Enzymatic Nucleic Acid
ggauggagcugaugaggccguuaggccgaaaaaucgcc

SEQ ID NO: 11678 - RNA, 38 nt, Artificial Sequence
  Description of Artificial Sequence:  Enzymatic Nucleic Acid
gggauggacugaugaggccguuaggccgaaaaaaucgc

SEQ ID NO: 11679 - RNA, 38 nt, Artificial Sequence
  Description of Artificial Sequence:  Enzymatic Nucleic Acid
gggggaugcugaugaggccguuaggccgaaagaaaauc

SEQ ID NO: 11680 - RNA, 38 nt, Artificial Sequence
  Description of Artificial Sequence:  Enzymatic Nucleic Acid
cuugggggcugaugaggccguuaggccgaaauggagaa

SEQ ID NO: 11681 - RNA, 38 nt, Artificial Sequence
  Description of Artificial Sequence:  Enzymatic Nucleic Acid
ugugugcucugaugaggccguuaggccgaaagcuuggg

SEQ ID NO: 11682 - RNA, 38 nt, Artificial Sequence
  Description of Artificial Sequence:  Enzymatic Nucleic Acid
auugucagcugaugaggccguuaggccgaaaugucuuu

SEQ ID NO: 11683 - RNA, 38 nt, Artificial Sequence
  Description of Artificial Sequence:  Enzymatic Nucleic Acid
uuugccaacugaugaggccguuaggccgaaauugucag

SEQ ID NO: 11684 - RNA, 38 nt, Artificial Sequence
  Description of Artificial Sequence:  Enzymatic Nucleic Acid
auuugccacugaugaggccguuaggccgaaaauuguca

SEQ ID NO: 11685 - RNA, 38 nt, Artificial Sequence
  Description of Artificial Sequence:  Enzymatic Nucleic Acid
uauuugcccugaugaggccguuaggccgaaaaauuguc

SEQ ID NO: 11686 - RNA, 38 nt, Artificial Sequence
  Description of Artificial Sequence:  Enzymatic Nucleic Acid
aaggguugcugaugaggccguuaggccgaaauuugcca

SEQ ID NO: 11687 - RNA, 38 nt, Artificial Sequence
  Description of Artificial Sequence:  Enzymatic Nucleic Acid
guaaucugcugaugaggccguuaggccgaaaggguugu

SEQ ID NO: 11688 - RNA, 38 nt, Artificial Sequence
  Description of Artificial Sequence:  Enzymatic Nucleic Acid
aguaaucucugaugaggccguuaggccgaaaaggguug

SEQ ID NO: 11689 - RNA, 38 nt, Artificial Sequence
  Description of Artificial Sequence:  Enzymatic Nucleic Acid
cugcaagucugaugaggccguuaggccgaaaucugaag

SEQ ID NO: 11690 - RNA, 38 nt, Artificial Sequence
  Description of Artificial Sequence:  Enzymatic Nucleic Acid
ccugcaagcugaugaggccguuaggccgaaaaucugaa

SEQ ID NO: 11691 - RNA, 38 nt, Artificial Sequence
  Description of Artificial Sequence:  Enzymatic Nucleic Acid
uccccugccugaugaggccguuaggccgaaaguaaucu

SEQ ID NO: 11692 - RNA, 38 nt, Artificial Sequence
  Description of Artificial Sequence:  Enzymatic Nucleic Acid
aucacgcucugaugaggccguuaggccgaaagcauugg

SEQ ID NO: 11693 - RNA, 38 nt, Artificial Sequence
  Description of Artificial Sequence:  Enzymatic Nucleic Acid
uuccucagcugaugaggccguuaggccgaaaucacgcu

SEQ ID NO: 11694 - RNA, 38 nt, Artificial Sequence
  Description of Artificial Sequence:  Enzymatic Nucleic Acid
uuuccucacugaugaggccguuaggccgaaaaucacgc

SEQ ID NO: 11695 - RNA, 38 nt, Artificial Sequence
  Description of Artificial Sequence:  Enzymatic Nucleic Acid
gucaccaacugaugaggccguuaggccgaaacccuuuc

SEQ ID NO: 11696 - RNA, 38 nt, Artificial Sequence
  Description of Artificial Sequence:  Enzymatic Nucleic Acid
cagucacccugaugaggccguuaggccgaaauacccuu

SEQ ID NO: 11697 - RNA, 38 nt, Artificial Sequence
  Description of Artificial Sequence:  Enzymatic Nucleic Acid
gcagaagacugaugaggccguuaggccgaaacugucac

SEQ ID NO: 11698 - RNA, 38 nt, Artificial Sequence
  Description of Artificial Sequence:  Enzymatic Nucleic Acid
uugcagaacugaugaggccguuaggccgaaauacuguc

SEQ ID NO: 11699 - RNA, 38 nt, Artificial Sequence
  Description of Artificial Sequence:  Enzymatic Nucleic Acid
uuuugcagcugaugaggccguuaggccgaaagauacug

SEQ ID NO: 11700 - RNA, 38 nt, Artificial Sequence
  Description of Artificial Sequence:  Enzymatic Nucleic Acid
guuuugcacugaugaggccguuaggccgaaaagauacu

SEQ ID NO: 11701 - RNA, 38 nt, Artificial Sequence
  Description of Artificial Sequence:  Enzymatic Nucleic Acid
ggaauggucugaugaggccguuaggccgaaaguguuuu

SEQ ID NO: 11702 - RNA, 38 nt, Artificial Sequence
  Description of Artificial Sequence:  Enzymatic Nucleic Acid
acccugggcugaugaggccguuaggccgaaauggugag

SEQ ID NO: 11703 - RNA, 38 nt, Artificial Sequence
  Description of Artificial Sequence:  Enzymatic Nucleic Acid
cacccuggcugaugaggccguuaggccgaaaaugguga

SEQ ID NO: 11704 - RNA, 38 nt, Artificial Sequence
  Description of Artificial Sequence:  Enzymatic Nucleic Acid
ucauuucccugaugaggccguuaggccgaaaccacccu

SEQ ID NO: 11705 - RNA, 38 nt, Artificial Sequence
  Description of Artificial Sequence:  Enzymatic Nucleic Acid
ggcuccagcugaugaggccguuaggccgaaaucauuuc

SEQ ID NO: 11706 - RNA, 38 nt, Artificial Sequence
  Description of Artificial Sequence:  Enzymatic Nucleic Acid
cccgguaccugaugaggccguuaggccgaaagcacuug

SEQ ID NO: 11707 - RNA, 38 nt, Artificial Sequence
  Description of Artificial Sequence:  Enzymatic Nucleic Acid
cgucccggcugaugaggccguuaggccgaaacgagcac

SEQ ID NO: 11708 - RNA, 38 nt, Artificial Sequence
  Description of Artificial Sequence:  Enzymatic Nucleic Acid
gcuauguccugaugaggccguuaggccgaaacgucccg

SEQ ID NO: 11709 - RNA, 38 nt, Artificial Sequence
  Description of Artificial Sequence:  Enzymatic Nucleic Acid
guggaggccugaugaggccguuaggccgaaaugucgac

SEQ ID NO: 11710 - RNA, 38 nt, Artificial Sequence
  Description of Artificial Sequence:  Enzymatic Nucleic Acid
aaacagugcugaugaggccguuaggccgaaaggcuaug

SEQ ID NO: 11711 - RNA, 38 nt, Artificial Sequence
  Description of Artificial Sequence:  Enzymatic Nucleic Acid
uagacauacugaugaggccguuaggccgaaacagugga

SEQ ID NO: 11712 - RNA, 38 nt, Artificial Sequence
  Description of Artificial Sequence:  Enzymatic Nucleic Acid
auagacaucugaugaggccguuaggccgaaaacagugg

SEQ ID NO: 11713 - RNA, 38 nt, Artificial Sequence
  Description of Artificial Sequence:  Enzymatic Nucleic Acid
cauagacacugaugaggccguuaggccgaaaaacagug

SEQ ID NO: 11714 - RNA, 38 nt, Artificial Sequence
  Description of Artificial Sequence:  Enzymatic Nucleic Acid
cgaacauacugaugaggccguuaggccgaaacauaaac

SEQ ID NO: 11715 - RNA, 38 nt, Artificial Sequence
  Description of Artificial Sequence:  Enzymatic Nucleic Acid
cucgaacacugaugaggccguuaggccgaaagacauaa

SEQ ID NO: 11716 - RNA, 38 nt, Artificial Sequence
  Description of Artificial Sequence:  Enzymatic Nucleic Acid
uaaucucgcugaugaggccguuaggccgaaacauagac

SEQ ID NO: 11717 - RNA, 38 nt, Artificial Sequence
  Description of Artificial Sequence:  Enzymatic Nucleic Acid
guaaucuccugaugaggccguuaggccgaaaacauaga

SEQ ID NO: 11718 - RNA, 38 nt, Artificial Sequence
  Description of Artificial Sequence:  Enzymatic Nucleic Acid
ugaucugucugaugaggccguuaggccgaaaucucgaa

SEQ ID NO: 11719 - RNA, 38 nt, Artificial Sequence
  Description of Artificial Sequence:  Enzymatic Nucleic Acid
gugaucugcugaugaggccguuaggccgaaaaucucga

SEQ ID NO: 11720 - RNA, 38 nt, Artificial Sequence
  Description of Artificial Sequence:  Enzymatic Nucleic Acid
ugaauggucugaugaggccguuaggccgaaaucuguaa

SEQ ID NO: 11721 - RNA, 38 nt, Artificial Sequence
  Description of Artificial Sequence:  Enzymatic Nucleic Acid
aggcgaugcugaugaggccguuaggccgaaauggugau

SEQ ID NO: 11722 - RNA, 38 nt, Artificial Sequence
  Description of Artificial Sequence:  Enzymatic Nucleic Acid
gaggcgaucugaugaggccguuaggccgaaaaugguga

SEQ ID NO: 11723 - RNA, 38 nt, Artificial Sequence
  Description of Artificial Sequence:  Enzymatic Nucleic Acid
acagaggccugaugaggccguuaggccgaaaugaaugg

SEQ ID NO: 11724 - RNA, 38 nt, Artificial Sequence
  Description of Artificial Sequence:  Enzymatic Nucleic Acid
cacugacacugaugaggccguuaggccgaaaggcgaug

SEQ ID NO: 11725 - RNA, 38 nt, Artificial Sequence
  Description of Artificial Sequence:  Enzymatic Nucleic Acid
uggucacucugaugaggccguuaggccgaaacagaggc

SEQ ID NO: 11726 - RNA, 38 nt, Artificial Sequence
  Description of Artificial Sequence:  Enzymatic Nucleic Acid
auguacaccugaugaggccguuaggccgaaaugccaug

SEQ ID NO: 11727 - RNA, 38 nt, Artificial Sequence
  Description of Artificial Sequence:  Enzymatic Nucleic Acid
cggugaugcugaugaggccguuaggccgaaacacgaug

SEQ ID NO: 11728 - RNA, 38 nt, Artificial Sequence
  Description of Artificial Sequence:  Enzymatic Nucleic Acid
uucucggucugaugaggccguuaggccgaaauguacac

SEQ ID NO: 11729 - RNA, 38 nt, Artificial Sequence
  Description of Artificial Sequence:  Enzymatic Nucleic Acid
cggcagggcugaugaggccguuaggccgaaaucaccac

SEQ ID NO: 11730 - RNA, 38 nt, Artificial Sequence
  Description of Artificial Sequence:  Enzymatic Nucleic Acid
uugaaauccugaugaggccguuaggccgaaacccucgg

SEQ ID NO: 11731 - RNA, 38 nt, Artificial Sequence
  Description of Artificial Sequence:  Enzymatic Nucleic Acid
agguuugacugaugaggccguuaggccgaaaucgaccc

SEQ ID NO: 11732 - RNA, 38 nt, Artificial Sequence
  Description of Artificial Sequence:  Enzymatic Nucleic Acid
gagguuugcugaugaggccguuaggccgaaaaucgacc

SEQ ID NO: 11733 - RNA, 38 nt, Artificial Sequence
  Description of Artificial Sequence:  Enzymatic Nucleic Acid
ugagguuucugaugaggccguuaggccgaaaaaucgac

SEQ ID NO: 11734 - RNA, 38 nt, Artificial Sequence
  Description of Artificial Sequence:  Enzymatic Nucleic Acid
gacacauucugaugaggccguuaggccgaaagguuuga

SEQ ID NO: 11735 - RNA, 38 nt, Artificial Sequence
  Description of Artificial Sequence:  Enzymatic Nucleic Acid
cgcaaagacugaugaggccguuaggccgaaacacauug

SEQ ID NO: 11736 - RNA, 38 nt, Artificial Sequence
  Description of Artificial Sequence:  Enzymatic Nucleic Acid
agcgcaaacugaugaggccguuaggccgaaagacacau

SEQ ID NO: 11737 - RNA, 38 nt, Artificial Sequence
  Description of Artificial Sequence:  Enzymatic Nucleic Acid
cuagcgcacugaugaggccguuaggccgaaagagacac

SEQ ID NO: 11738 - RNA, 38 nt, Artificial Sequence
  Description of Artificial Sequence:  Enzymatic Nucleic Acid
ccuagcgccugaugaggccguuaggccgaaaagagaca

SEQ ID NO: 11739 - RNA, 38 nt, Artificial Sequence
  Description of Artificial Sequence:  Enzymatic Nucleic Acid
uggauacccugaugaggccguuaggccgaaagcgcaaa

SEQ ID NO: 11740 - RNA, 38 nt, Artificial Sequence
  Description of Artificial Sequence:  Enzymatic Nucleic Acid
uuucuggacugaugaggccguuaggccgaaaccuagcg

SEQ ID NO: 11741 - RNA, 38 nt, Artificial Sequence
  Description of Artificial Sequence:  Enzymatic Nucleic Acid
cuuuucugcugaugaggccguuaggccgaaauaccuag

SEQ ID NO: 11742 - RNA, 38 nt, Artificial Sequence
  Description of Artificial Sequence:  Enzymatic Nucleic Acid
ccggaacacugaugaggccguuaggccgaaaucucuuu

SEQ ID NO: 11743 - RNA, 38 nt, Artificial Sequence
  Description of Artificial Sequence:  Enzymatic Nucleic Acid
uccggaaccugaugaggccguuaggccgaaaaucucuu

SEQ ID NO: 11744 - RNA, 38 nt, Artificial Sequence
  Description of Artificial Sequence:  Enzymatic Nucleic Acid
ccauccggcugaugaggccguuaggccgaaacaaaucu

SEQ ID NO: 11745 - RNA, 38 nt, Artificial Sequence
  Description of Artificial Sequence:  Enzymatic Nucleic Acid
uccauccgcugaugaggccguuaggccgaaaacaaauc

SEQ ID NO: 11746 - RNA, 38 nt, Artificial Sequence
  Description of Artificial Sequence:  Enzymatic Nucleic Acid
guaaagcccugaugaggccguuaggccgaaaucucgcu

SEQ ID NO: 11747 - RNA, 38 nt, Artificial Sequence
  Description of Artificial Sequence:  Enzymatic Nucleic Acid
ggagaguacugaugaggccguuaggccgaaagccuauc

SEQ ID NO: 11748 - RNA, 38 nt, Artificial Sequence
  Description of Artificial Sequence:  Enzymatic Nucleic Acid
gggagagucugaugaggccguuaggccgaaaagccuau

SEQ ID NO: 11749 - RNA, 38 nt, Artificial Sequence
  Description of Artificial Sequence:  Enzymatic Nucleic Acid
ggggagagcugaugaggccguuaggccgaaaaagccua

SEQ ID NO: 11750 - RNA, 38 nt, Artificial Sequence
  Description of Artificial Sequence:  Enzymatic Nucleic Acid
acuggggacugaugaggccguuaggccgaaaguaaagc

SEQ ID NO: 11751 - RNA, 38 nt, Artificial Sequence
  Description of Artificial Sequence:  Enzymatic Nucleic Acid
uaacugggcugaugaggccguuaggccgaaagaguaaa

SEQ ID NO: 11752 - RNA, 38 nt, Artificial Sequence
  Description of Artificial Sequence:  Enzymatic Nucleic Acid
gaucaugucugaugaggccguuaggccgaaacugggga

SEQ ID NO: 11753 - RNA, 38 nt, Artificial Sequence
  Description of Artificial Sequence:  Enzymatic Nucleic Acid
ugaucaugcugaugaggccguuaggccgaaaacugggg

SEQ ID NO: 11754 - RNA, 38 nt, Artificial Sequence
  Description of Artificial Sequence:  Enzymatic Nucleic Acid
ugccggcacugaugaggccguuaggccgaaagcugauc

SEQ ID NO: 11755 - RNA, 38 nt, Artificial Sequence
  Description of Artificial Sequence:  Enzymatic Nucleic Acid
ccucacagcugaugaggccguuaggccgaaagaccaug

SEQ ID NO: 11756 - RNA, 38 nt, Artificial Sequence
  Description of Artificial Sequence:  Enzymatic Nucleic Acid
gccucacacugaugaggccguuaggccgaaaagaccau

SEQ ID NO: 11757 - RNA, 38 nt, Artificial Sequence
  Description of Artificial Sequence:  Enzymatic Nucleic Acid
ucaucauucugaugaggccguuaggccgaaaucuuugc

SEQ ID NO: 11758 - RNA, 38 nt, Artificial Sequence
  Description of Artificial Sequence:  Enzymatic Nucleic Acid
uagacugacugaugaggccguuaggccgaaagguuuca

SEQ ID NO: 11759 - RNA, 38 nt, Artificial Sequence
  Description of Artificial Sequence:  Enzymatic Nucleic Acid
gauagacucugaugaggccguuaggccgaaauagguuu

SEQ ID NO: 11760 - RNA, 38 nt, Artificial Sequence
  Description of Artificial Sequence:  Enzymatic Nucleic Acid
acaugauacugaugaggccguuaggccgaaacugauag

SEQ ID NO: 11761 - RNA, 38 nt, Artificial Sequence
  Description of Artificial Sequence:  Enzymatic Nucleic Acid
guacaugacugaugaggccguuaggccgaaagacugau

SEQ ID NO: 11762 - RNA, 38 nt, Artificial Sequence
  Description of Artificial Sequence:  Enzymatic Nucleic Acid
caacuaugcugaugaggccguuaggccgaaacaugaua

SEQ ID NO: 11763 - RNA, 38 nt, Artificial Sequence
  Description of Artificial Sequence:  Enzymatic Nucleic Acid
accacaaccugaugaggccguuaggccgaaauguacau

SEQ ID NO: 11764 - RNA, 38 nt, Artificial Sequence
  Description of Artificial Sequence:  Enzymatic Nucleic Acid
acaaccaccugaugaggccguuaggccgaaacuaugua

SEQ ID NO: 11765 - RNA, 38 nt, Artificial Sequence
  Description of Artificial Sequence:  Enzymatic Nucleic Acid
uauccuaccugaugaggccguuaggccgaaaccacaac

SEQ ID NO: 11766 - RNA, 38 nt, Artificial Sequence
  Description of Artificial Sequence:  Enzymatic Nucleic Acid
cuauaucccugaugaggccguuaggccgaaacaaccac

SEQ ID NO: 11767 - RNA, 38 nt, Artificial Sequence
  Description of Artificial Sequence:  Enzymatic Nucleic Acid
aaauccuacugaugaggccguuaggccgaaauccuaca

SEQ ID NO: 11768 - RNA, 38 nt, Artificial Sequence
  Description of Artificial Sequence:  Enzymatic Nucleic Acid
auaaaucccugaugaggccguuaggccgaaauauccua

SEQ ID NO: 11769 - RNA, 38 nt, Artificial Sequence
  Description of Artificial Sequence:  Enzymatic Nucleic Acid
ucacaucacugaugaggccguuaggccgaaaaauccua

SEQ ID NO: 11770 - RNA, 38 nt, Artificial Sequence
  Description of Artificial Sequence:  Enzymatic Nucleic Acid
gggcucagcugaugaggccguuaggccgaaaucacauc

SEQ ID NO: 11771 - RNA, 38 nt, Artificial Sequence
  Description of Artificial Sequence:  Enzymatic Nucleic Acid
ggggcucacugaugaggccguuaggccgaaaaucacau

SEQ ID NO: 11772 - RNA, 38 nt, Artificial Sequence
  Description of Artificial Sequence:  Enzymatic Nucleic Acid
gauagcuccugaugaggccguuaggccgaaauuucaug

SEQ ID NO: 11773 - RNA, 38 nt, Artificial Sequence
  Description of Artificial Sequence:  Enzymatic Nucleic Acid
ccggcagacugaugaggccguuaggccgaaagcucaau

SEQ ID NO: 11774 - RNA, 38 nt, Artificial Sequence
  Description of Artificial Sequence:  Enzymatic Nucleic Acid
cuccggcacugaugaggccguuaggccgaaauagcuca

SEQ ID NO: 11775 - RNA, 38 nt, Artificial Sequence
  Description of Artificial Sequence:  Enzymatic Nucleic Acid
uuuaagaccugaugaggccguuaggccgaaaguuuuuc

SEQ ID NO: 11776 - RNA, 38 nt, Artificial Sequence
  Description of Artificial Sequence:  Enzymatic Nucleic Acid
caauuuaacugaugaggccguuaggccgaaacaaguuu

SEQ ID NO: 11777 - RNA, 38 nt, Artificial Sequence
  Description of Artificial Sequence:  Enzymatic Nucleic Acid
uacaauuucugaugaggccguuaggccgaaagacaagu

SEQ ID NO: 11778 - RNA, 38 nt, Artificial Sequence
  Description of Artificial Sequence:  Enzymatic Nucleic Acid
cgcuguaccugaugaggccguuaggccgaaauuuaaga

SEQ ID NO: 11779 - RNA, 38 nt, Artificial Sequence
  Description of Artificial Sequence:  Enzymatic Nucleic Acid
ucucgcugcugaugaggccguuaggccgaaacaauuua

SEQ ID NO: 11780 - RNA, 38 nt, Artificial Sequence
  Description of Artificial Sequence:  Enzymatic Nucleic Acid
cccacauucugaugaggccguuaggccgaaagcucugu

SEQ ID NO: 11781 - RNA, 38 nt, Artificial Sequence
  Description of Artificial Sequence:  Enzymatic Nucleic Acid
gugaaauccugaugaggccguuaggccgaaagccccac

SEQ ID NO: 11782 - RNA, 38 nt, Artificial Sequence
  Description of Artificial Sequence:  Enzymatic Nucleic Acid
ccaggugacugaugaggccguuaggccgaaaucaagcc

SEQ ID NO: 11783 - RNA, 38 nt, Artificial Sequence
  Description of Artificial Sequence:  Enzymatic Nucleic Acid
gccaggugcugaugaggccguuaggccgaaaaucaagc

SEQ ID NO: 11784 - RNA, 38 nt, Artificial Sequence
  Description of Artificial Sequence:  Enzymatic Nucleic Acid
ugccaggucugaugaggccguuaggccgaaaaaucaag

SEQ ID NO: 11785 - RNA, 38 nt, Artificial Sequence
  Description of Artificial Sequence:  Enzymatic Nucleic Acid
aagguggacugaugaggccguuaggccgaaagugccag

SEQ ID NO: 11786 - RNA, 38 nt, Artificial Sequence
  Description of Artificial Sequence:  Enzymatic Nucleic Acid
ugaaggugcugaugaggccguuaggccgaaagagugcc

SEQ ID NO: 11787 - RNA, 38 nt, Artificial Sequence
  Description of Artificial Sequence:  Enzymatic Nucleic Acid
agacuuugcugaugaggccguuaggccgaaagguggag

SEQ ID NO: 11788 - RNA, 38 nt, Artificial Sequence
  Description of Artificial Sequence:  Enzymatic Nucleic Acid
gagacuuucugaugaggccguuaggccgaaaaggugga

SEQ ID NO: 11789 - RNA, 38 nt, Artificial Sequence
  Description of Artificial Sequence:  Enzymatic Nucleic Acid
uaugaugacugaugaggccguuaggccgaaacuuugaa

SEQ ID NO: 11790 - RNA, 38 nt, Artificial Sequence
  Description of Artificial Sequence:  Enzymatic Nucleic Acid
cuuaugaucugaugaggccguuaggccgaaagacuuug

SEQ ID NO: 11791 - RNA, 38 nt, Artificial Sequence
  Description of Artificial Sequence:  Enzymatic Nucleic Acid
cuucuuaucugaugaggccguuaggccgaaaugagacu

SEQ ID NO: 11792 - RNA, 38 nt, Artificial Sequence
  Description of Artificial Sequence:  Enzymatic Nucleic Acid
aaucuucucugaugaggccguuaggccgaaaugaugag

SEQ ID NO: 11793 - RNA, 38 nt, Artificial Sequence
  Description of Artificial Sequence:  Enzymatic Nucleic Acid
cgguuuaccugaugaggccguuaggccgaaaucuucuu

SEQ ID NO: 11794 - RNA, 38 nt, Artificial Sequence
  Description of Artificial Sequence:  Enzymatic Nucleic Acid
ucccgguucugaugaggccguuaggccgaaacaaucuu

SEQ ID NO: 11795 - RNA, 38 nt, Artificial Sequence
  Description of Artificial Sequence:  Enzymatic Nucleic Acid
ucccaggacugaugaggccguuaggccgaaaggguuuc

SEQ ID NO: 11796 - RNA, 38 nt, Artificial Sequence
  Description of Artificial Sequence:  Enzymatic Nucleic Acid
gucccaggcugaugaggccguuaggccgaaaaggguuu

SEQ ID NO: 11797 - RNA, 38 nt, Artificial Sequence
  Description of Artificial Sequence:  Enzymatic Nucleic Acid
agucccagcugaugaggccguuaggccgaaaaaggguu

SEQ ID NO: 11798 - RNA, 38 nt, Artificial Sequence
  Description of Artificial Sequence:  Enzymatic Nucleic Acid
ugcucaaacugaugaggccguuaggccgaaacaucuuc

SEQ ID NO: 11799 - RNA, 38 nt, Artificial Sequence
  Description of Artificial Sequence:  Enzymatic Nucleic Acid
gugcucaacugaugaggccguuaggccgaaaacaucuu

SEQ ID NO: 11800 - RNA, 38 nt, Artificial Sequence
  Description of Artificial Sequence:  Enzymatic Nucleic Acid
ggugcucacugaugaggccguuaggccgaaaaacaucu

SEQ ID NO: 11801 - RNA, 38 nt, Artificial Sequence
  Description of Artificial Sequence:  Enzymatic Nucleic Acid
aggugcuccugaugaggccguuaggccgaaaaaacauc

SEQ ID NO: 11802 - RNA, 38 nt, Artificial Sequence
  Description of Artificial Sequence:  Enzymatic Nucleic Acid
cuauuguccugaugaggccguuaggccgaaaggugcuc

SEQ ID NO: 11803 - RNA, 38 nt, Artificial Sequence
  Description of Artificial Sequence:  Enzymatic Nucleic Acid
acacuuuccugaugaggccguuaggccgaaauugucaa

SEQ ID NO: 11804 - RNA, 38 nt, Artificial Sequence
  Description of Artificial Sequence:  Enzymatic Nucleic Acid
cacaggugcugaugaggccguuaggccgaaauuccccu

SEQ ID NO: 11805 - RNA, 38 nt, Artificial Sequence
  Description of Artificial Sequence:  Enzymatic Nucleic Acid
cuggacgccugaugaggccguuaggccgaaacacaggu

SEQ ID NO: 11806 - RNA, 38 nt, Artificial Sequence
  Description of Artificial Sequence:  Enzymatic Nucleic Acid
guccacugcugaugaggccguuaggccgaaacgcuaca

SEQ ID NO: 11807 - RNA, 38 nt, Artificial Sequence
  Description of Artificial Sequence:  Enzymatic Nucleic Acid
uuucucuucugaugaggccguuaggccgaaaucauccg

SEQ ID NO: 11808 - RNA, 38 nt, Artificial Sequence
  Description of Artificial Sequence:  Enzymatic Nucleic Acid
aaauguuccugaugaggccguuaggccgaaauuucucu

SEQ ID NO: 11809 - RNA, 38 nt, Artificial Sequence
  Description of Artificial Sequence:  Enzymatic Nucleic Acid
cucggacacugaugaggccguuaggccgaaauguucua

SEQ ID NO: 11810 - RNA, 38 nt, Artificial Sequence
  Description of Artificial Sequence:  Enzymatic Nucleic Acid
acucggaccugaugaggccguuaggccgaaaauguucu

SEQ ID NO: 11811 - RNA, 38 nt, Artificial Sequence
  Description of Artificial Sequence:  Enzymatic Nucleic Acid
ugaacucgcugaugaggccguuaggccgaaacaaaugu

SEQ ID NO: 11812 - RNA, 38 nt, Artificial Sequence
  Description of Artificial Sequence:  Enzymatic Nucleic Acid
uuugugugcugaugaggccguuaggccgaaacucggac

SEQ ID NO: 11813 - RNA, 38 nt, Artificial Sequence
  Description of Artificial Sequence:  Enzymatic Nucleic Acid
cuuugugucugaugaggccguuaggccgaaaacucgga

SEQ ID NO: 11814 - RNA, 38 nt, Artificial Sequence
  Description of Artificial Sequence:  Enzymatic Nucleic Acid
agcaauaacugaugaggccguuaggccgaaaggcuuug

SEQ ID NO: 11815 - RNA, 38 nt, Artificial Sequence
  Description of Artificial Sequence:  Enzymatic Nucleic Acid
aagcaauacugaugaggccguuaggccgaaaaggcuuu

SEQ ID NO: 11816 - RNA, 38 nt, Artificial Sequence
  Description of Artificial Sequence:  Enzymatic Nucleic Acid
aaagcaaucugaugaggccguuaggccgaaaaaggcuu

SEQ ID NO: 11817 - RNA, 38 nt, Artificial Sequence
  Description of Artificial Sequence:  Enzymatic Nucleic Acid
gaaagcaacugaugaggccguuaggccgaaaaaaggcu

SEQ ID NO: 11818 - RNA, 38 nt, Artificial Sequence
  Description of Artificial Sequence:  Enzymatic Nucleic Acid
ccgaaagccugaugaggccguuaggccgaaauaaaagg

SEQ ID NO: 11819 - RNA, 38 nt, Artificial Sequence
  Description of Artificial Sequence:  Enzymatic Nucleic Acid
acuaccgacugaugaggccguuaggccgaaagcaauaa

SEQ ID NO: 11820 - RNA, 38 nt, Artificial Sequence
  Description of Artificial Sequence:  Enzymatic Nucleic Acid
cacuaccgcugaugaggccguuaggccgaaaagcaaua

SEQ ID NO: 11821 - RNA, 38 nt, Artificial Sequence
  Description of Artificial Sequence:  Enzymatic Nucleic Acid
ccacuacccugaugaggccguuaggccgaaaaagcaau

SEQ ID NO: 11822 - RNA, 38 nt, Artificial Sequence
  Description of Artificial Sequence:  Enzymatic Nucleic Acid
caucccaccugaugaggccguuaggccgaaaccgaaag

SEQ ID NO: 11823 - RNA, 38 nt, Artificial Sequence
  Description of Artificial Sequence:  Enzymatic Nucleic Acid
ccaccaaacugaugaggccguuaggccgaaauuucauc

SEQ ID NO: 11824 - RNA, 38 nt, Artificial Sequence
  Description of Artificial Sequence:  Enzymatic Nucleic Acid
uuccaccacugaugaggccguuaggccgaaagauuuca

SEQ ID NO: 11825 - RNA, 38 nt, Artificial Sequence
  Description of Artificial Sequence:  Enzymatic Nucleic Acid
cuuccacccugaugaggccguuaggccgaaaagauuuc

SEQ ID NO: 11826 - RNA, 38 nt, Artificial Sequence
  Description of Artificial Sequence:  Enzymatic Nucleic Acid
ucggacuucugaugaggccguuaggccgaaacugccca

SEQ ID NO: 11827 - RNA, 38 nt, Artificial Sequence
  Description of Artificial Sequence:  Enzymatic Nucleic Acid
gggauucgcugaugaggccguuaggccgaaacuugacu

SEQ ID NO: 11828 - RNA, 38 nt, Artificial Sequence
  Description of Artificial Sequence:  Enzymatic Nucleic Acid
uucacaggcugaugaggccguuaggccgaaauucggac

SEQ ID NO: 11829 - RNA, 38 nt, Artificial Sequence
  Description of Artificial Sequence:  Enzymatic Nucleic Acid
aacugagacugaugaggccguuaggccgaaacuucaca

SEQ ID NO: 11830 - RNA, 38 nt, Artificial Sequence
  Description of Artificial Sequence:  Enzymatic Nucleic Acid
guaacugacugaugaggccguuaggccgaaauacuuca

SEQ ID NO: 11831 - RNA, 38 nt, Artificial Sequence
  Description of Artificial Sequence:  Enzymatic Nucleic Acid
ggguaacucugaugaggccguuaggccgaaagauacuu

SEQ ID NO: 11832 - RNA, 38 nt, Artificial Sequence
  Description of Artificial Sequence:  Enzymatic Nucleic Acid
agcugggucugaugaggccguuaggccgaaacugagau

SEQ ID NO: 11833 - RNA, 38 nt, Artificial Sequence
  Description of Artificial Sequence:  Enzymatic Nucleic Acid
gagcugggcugaugaggccguuaggccgaaaacugaga

SEQ ID NO: 11834 - RNA, 38 nt, Artificial Sequence
  Description of Artificial Sequence:  Enzymatic Nucleic Acid
gauaucagcugaugaggccguuaggccgaaagcugggu

SEQ ID NO: 11835 - RNA, 38 nt, Artificial Sequence
  Description of Artificial Sequence:  Enzymatic Nucleic Acid
ccauuugacugaugaggccguuaggccgaaaucaggag

SEQ ID NO: 11836 - RNA, 38 nt, Artificial Sequence
  Description of Artificial Sequence:  Enzymatic Nucleic Acid
uaccauuucugaugaggccguuaggccgaaauaucagg

SEQ ID NO: 11837 - RNA, 38 nt, Artificial Sequence
  Description of Artificial Sequence:  Enzymatic Nucleic Acid
cauuucugcugaugaggccguuaggccgaaaccauuug

SEQ ID NO: 11838 - RNA, 38 nt, Artificial Sequence
  Description of Artificial Sequence:  Enzymatic Nucleic Acid
uuggacuccugaugaggccguuaggccgaaaugggccu

SEQ ID NO: 11839 - RNA, 38 nt, Artificial Sequence
  Description of Artificial Sequence:  Enzymatic Nucleic Acid
uguaguugcugaugaggccguuaggccgaaacucaaug

SEQ ID NO: 11840 - RNA, 38 nt, Artificial Sequence
  Description of Artificial Sequence:  Enzymatic Nucleic Acid
ucauugugcugaugaggccguuaggccgaaaguuggac

SEQ ID NO: 11841 - RNA, 38 nt, Artificial Sequence
  Description of Artificial Sequence:  Enzymatic Nucleic Acid
ucgccaaccugaugaggccguuaggccgaaaucauugu

SEQ ID NO: 11842 - RNA, 38 nt, Artificial Sequence
  Description of Artificial Sequence:  Enzymatic Nucleic Acid
ucaucgcccugaugaggccguuaggccgaaacaaucau

SEQ ID NO: 11843 - RNA, 38 nt, Artificial Sequence
  Description of Artificial Sequence:  Enzymatic Nucleic Acid
augauggucugaugaggccguuaggccgaaaguucauc

SEQ ID NO: 11844 - RNA, 38 nt, Artificial Sequence
  Description of Artificial Sequence:  Enzymatic Nucleic Acid
acuuccaucugaugaggccguuaggccgaaauggugag

SEQ ID NO: 11845 - RNA, 38 nt, Artificial Sequence
  Description of Artificial Sequence:  Enzymatic Nucleic Acid
ugaccgugcugaugaggccguuaggccgaaaguuuccu

SEQ ID NO: 11846 - RNA, 38 nt, Artificial Sequence
  Description of Artificial Sequence:  Enzymatic Nucleic Acid
gugaggaucugaugaggccguuaggccgaaaccgugua

SEQ ID NO: 11847 - RNA, 38 nt, Artificial Sequence
  Description of Artificial Sequence:  Enzymatic Nucleic Acid
uuggugagcugaugaggccguuaggccgaaaugaccgu

SEQ ID NO: 11848 - RNA, 38 nt, Artificial Sequence
  Description of Artificial Sequence:  Enzymatic Nucleic Acid
ggguuggucugaugaggccguuaggccgaaaggaugac

SEQ ID NO: 11849 - RNA, 38 nt, Artificial Sequence
  Description of Artificial Sequence:  Enzymatic Nucleic Acid
uccauugacugaugaggccguuaggccgaaaugggguu

SEQ ID NO: 11850 - RNA, 38 nt, Artificial Sequence
  Description of Artificial Sequence:  Enzymatic Nucleic Acid
cuccauugcugaugaggccguuaggccgaaaauggggu

SEQ ID NO: 11851 - RNA, 38 nt, Artificial Sequence
  Description of Artificial Sequence:  Enzymatic Nucleic Acid
ucuccauucugaugaggccguuaggccgaaaaaugggg

SEQ ID NO: 11852 - RNA, 38 nt, Artificial Sequence
  Description of Artificial Sequence:  Enzymatic Nucleic Acid
accagagacugaugaggccguuaggccgaaaccaugug

SEQ ID NO: 11853 - RNA, 38 nt, Artificial Sequence
  Description of Artificial Sequence:  Enzymatic Nucleic Acid
caaccagacugaugaggccguuaggccgaaagaccaug

SEQ ID NO: 11854 - RNA, 38 nt, Artificial Sequence
  Description of Artificial Sequence:  Enzymatic Nucleic Acid
acauucaccugaugaggccguuaggccgaaaccagaga

SEQ ID NO: 11855 - RNA, 38 nt, Artificial Sequence
  Description of Artificial Sequence:  Enzymatic Nucleic Acid
ugggguggcugaugaggccguuaggccgaaacauucac

SEQ ID NO: 11856 - RNA, 38 nt, Artificial Sequence
  Description of Artificial Sequence:  Enzymatic Nucleic Acid
gcgagauccugaugaggccguuaggccgaaaggcuuuc

SEQ ID NO: 11857 - RNA, 38 nt, Artificial Sequence
  Description of Artificial Sequence:  Enzymatic Nucleic Acid
auaggcgacugaugaggccguuaggccgaaaucaaggc

SEQ ID NO: 11858 - RNA, 38 nt, Artificial Sequence
  Description of Artificial Sequence:  Enzymatic Nucleic Acid
ccauaggccugaugaggccguuaggccgaaagaucaag

SEQ ID NO: 11859 - RNA, 38 nt, Artificial Sequence
  Description of Artificial Sequence:  Enzymatic Nucleic Acid
ggaauccacugaugaggccguuaggccgaaaggcgaga

SEQ ID NO: 11860 - RNA, 38 nt, Artificial Sequence
  Description of Artificial Sequence:  Enzymatic Nucleic Acid
cugguaggcugaugaggccguuaggccgaaauccauag

SEQ ID NO: 11861 - RNA, 38 nt, Artificial Sequence
  Description of Artificial Sequence:  Enzymatic Nucleic Acid
acugguagcugaugaggccguuaggccgaaaauccaua

SEQ ID NO: 11862 - RNA, 38 nt, Artificial Sequence
  Description of Artificial Sequence:  Enzymatic Nucleic Acid
cauacuggcugaugaggccguuaggccgaaaggaaucc

SEQ ID NO: 11863 - RNA, 38 nt, Artificial Sequence
  Description of Artificial Sequence:  Enzymatic Nucleic Acid
uggucccacugaugaggccguuaggccgaaacugguag

SEQ ID NO: 11864 - RNA, 38 nt, Artificial Sequence
  Description of Artificial Sequence:  Enzymatic Nucleic Acid
ugcauguccugaugaggccguuaggccgaaaugucugc

SEQ ID NO: 11865 - RNA, 38 nt, Artificial Sequence
  Description of Artificial Sequence:  Enzymatic Nucleic Acid
uuggcguacugaugaggccguuaggccgaaacugugca

SEQ ID NO: 11866 - RNA, 38 nt, Artificial Sequence
  Description of Artificial Sequence:  Enzymatic Nucleic Acid
gguuggcgcugaugaggccguuaggccgaaagacugug

SEQ ID NO: 11867 - RNA, 38 nt, Artificial Sequence
  Description of Artificial Sequence:  Enzymatic Nucleic Acid
gugcagggcugaugaggccguuaggccgaaaggguugg

SEQ ID NO: 11868 - RNA, 38 nt, Artificial Sequence
  Description of Artificial Sequence:  Enzymatic Nucleic Acid
uaccacugcugaugaggccguuaggccgaaauguggug

SEQ ID NO: 11869 - RNA, 38 nt, Artificial Sequence
  Description of Artificial Sequence:  Enzymatic Nucleic Acid
gcugccagcugaugaggccguuaggccgaaaccacugg

SEQ ID NO: 11870 - RNA, 38 nt, Artificial Sequence
  Description of Artificial Sequence:  Enzymatic Nucleic Acid
gcuucuuccugaugaggccguuaggccgaaagcugcca

SEQ ID NO: 11871 - RNA, 38 nt, Artificial Sequence
  Description of Artificial Sequence:  Enzymatic Nucleic Acid
gucuguagcugaugaggccguuaggccgaaagcaggcu

SEQ ID NO: 11872 - RNA, 38 nt, Artificial Sequence
  Description of Artificial Sequence:  Enzymatic Nucleic Acid
cgggucugcugaugaggccguuaggccgaaaggagcag

SEQ ID NO: 11873 - RNA, 38 nt, Artificial Sequence
  Description of Artificial Sequence:  Enzymatic Nucleic Acid
uacaagcacugaugaggccguuaggccgaaacgggcuu

SEQ ID NO: 11874 - RNA, 38 nt, Artificial Sequence
  Description of Artificial Sequence:  Enzymatic Nucleic Acid
uucuuuaccugaugaggccguuaggccgaaagcauacg

SEQ ID NO: 11875 - RNA, 38 nt, Artificial Sequence
  Description of Artificial Sequence:  Enzymatic Nucleic Acid
ccauucuucugaugaggccguuaggccgaaacaagcau

SEQ ID NO: 11876 - RNA, 38 nt, Artificial Sequence
  Description of Artificial Sequence:  Enzymatic Nucleic Acid
ccccuggacugaugaggccguuaggccgaaauccucca

SEQ ID NO: 11877 - RNA, 38 nt, Artificial Sequence
  Description of Artificial Sequence:  Enzymatic Nucleic Acid
cccccuggcugaugaggccguuaggccgaaaauccucc

SEQ ID NO: 11878 - RNA, 38 nt, Artificial Sequence
  Description of Artificial Sequence:  Enzymatic Nucleic Acid
ccccccugcugaugaggccguuaggccgaaaaauccuc

SEQ ID NO: 11879 - RNA, 38 nt, Artificial Sequence
  Description of Artificial Sequence:  Enzymatic Nucleic Acid
gugacuuccugaugaggccguuaggccgaaaucuuguu

SEQ ID NO: 11880 - RNA, 38 nt, Artificial Sequence
  Description of Artificial Sequence:  Enzymatic Nucleic Acid
uuuuuggucugaugaggccguuaggccgaaacuucgau

SEQ ID NO: 11881 - RNA, 38 nt, Artificial Sequence
  Description of Artificial Sequence:  Enzymatic Nucleic Acid
ucagggcacugaugaggccguuaggccgaaauugguuu

SEQ ID NO: 11882 - RNA, 38 nt, Artificial Sequence
  Description of Artificial Sequence:  Enzymatic Nucleic Acid
uuuccuuccugaugaggccguuaggccgaaaucagggc

SEQ ID NO: 11883 - RNA, 38 nt, Artificial Sequence
  Description of Artificial Sequence:  Enzymatic Nucleic Acid
agcguacucugaugaggccguuaggccgaaacaguuuu

SEQ ID NO: 11884 - RNA, 38 nt, Artificial Sequence
  Description of Artificial Sequence:  Enzymatic Nucleic Acid
gaccagcgcugaugaggccguuaggccgaaacuuacag

SEQ ID NO: 11885 - RNA, 38 nt, Artificial Sequence
  Description of Artificial Sequence:  Enzymatic Nucleic Acid
gcuuggaucugaugaggccguuaggccgaaaccagcgu

SEQ ID NO: 11886 - RNA, 38 nt, Artificial Sequence
  Description of Artificial Sequence:  Enzymatic Nucleic Acid
gcagcuugcugaugaggccguuaggccgaaaugaccag

SEQ ID NO: 11887 - RNA, 38 nt, Artificial Sequence
  Description of Artificial Sequence:  Enzymatic Nucleic Acid
acaacgcucugaugaggccguuaggccgaaacacguug

SEQ ID NO: 11888 - RNA, 38 nt, Artificial Sequence
  Description of Artificial Sequence:  Enzymatic Nucleic Acid
auuuguaccugaugaggccguuaggccgaaacgcugac

SEQ ID NO: 11889 - RNA, 38 nt, Artificial Sequence
  Description of Artificial Sequence:  Enzymatic Nucleic Acid
cacauuugcugaugaggccguuaggccgaaacaacgcu

SEQ ID NO: 11890 - RNA, 38 nt, Artificial Sequence
  Description of Artificial Sequence:  Enzymatic Nucleic Acid
gcuuuguucugaugaggccguuaggccgaaauggcuuc

SEQ ID NO: 11891 - RNA, 38 nt, Artificial Sequence
  Description of Artificial Sequence:  Enzymatic Nucleic Acid
aaggagaucugaugaggccguuaggccgaaacccucuc

SEQ ID NO: 11892 - RNA, 38 nt, Artificial Sequence
  Description of Artificial Sequence:  Enzymatic Nucleic Acid
uggaaggacugaugaggccguuaggccgaaaugacccu

SEQ ID NO: 11893 - RNA, 38 nt, Artificial Sequence
  Description of Artificial Sequence:  Enzymatic Nucleic Acid
cauggaagcugaugaggccguuaggccgaaagaugacc

SEQ ID NO: 11894 - RNA, 38 nt, Artificial Sequence
  Description of Artificial Sequence:  Enzymatic Nucleic Acid
ucacauggcugaugaggccguuaggccgaaaggagaug

SEQ ID NO: 11895 - RNA, 38 nt, Artificial Sequence
  Description of Artificial Sequence:  Enzymatic Nucleic Acid
aucacaugcugaugaggccguuaggccgaaaaggagau

SEQ ID NO: 11896 - RNA, 38 nt, Artificial Sequence
  Description of Artificial Sequence:  Enzymatic Nucleic Acid
ggaccccucugaugaggccguuaggccgaaaucacaug

SEQ ID NO: 11897 - RNA, 38 nt, Artificial Sequence
  Description of Artificial Sequence:  Enzymatic Nucleic Acid
aauuucagcugaugaggccguuaggccgaaaccccuga

SEQ ID NO: 11898 - RNA, 38 nt, Artificial Sequence
  Description of Artificial Sequence:  Enzymatic Nucleic Acid
ugcacagucugaugaggccguuaggccgaaauuucagg

SEQ ID NO: 11899 - RNA, 38 nt, Artificial Sequence
  Description of Artificial Sequence:  Enzymatic Nucleic Acid
uugcacagcugaugaggccguuaggccgaaaauuucag

SEQ ID NO: 11900 - RNA, 38 nt, Artificial Sequence
  Description of Artificial Sequence:  Enzymatic Nucleic Acid
acaacaggcugaugaggccguuaggccgaaacacacuc

SEQ ID NO: 11901 - RNA, 38 nt, Artificial Sequence
  Description of Artificial Sequence:  Enzymatic Nucleic Acid
cagugcaccugaugaggccguuaggccgaaacagggac

SEQ ID NO: 11902 - RNA, 38 nt, Artificial Sequence
  Description of Artificial Sequence:  Enzymatic Nucleic Acid
cucaaacgcugaugaggccguuaggccgaaauuucugu

SEQ ID NO: 11903 - RNA, 38 nt, Artificial Sequence
  Description of Artificial Sequence:  Enzymatic Nucleic Acid
gguucucacugaugaggccguuaggccgaaacguauuu

SEQ ID NO: 11904 - RNA, 38 nt, Artificial Sequence
  Description of Artificial Sequence:  Enzymatic Nucleic Acid
agguucuccugaugaggccguuaggccgaaaacguauu

SEQ ID NO: 11905 - RNA, 38 nt, Artificial Sequence
  Description of Artificial Sequence:  Enzymatic Nucleic Acid
uaccacgucugaugaggccguuaggccgaaagguucuc

SEQ ID NO: 11906 - RNA, 38 nt, Artificial Sequence
  Description of Artificial Sequence:  Enzymatic Nucleic Acid
caagcuugcugaugaggccguuaggccgaaaccacgug

SEQ ID NO: 11907 - RNA, 38 nt, Artificial Sequence
  Description of Artificial Sequence:  Enzymatic Nucleic Acid
ugugagcccugaugaggccguuaggccgaaagcuugua

SEQ ID NO: 11908 - RNA, 38 nt, Artificial Sequence
  Description of Artificial Sequence:  Enzymatic Nucleic Acid
uugccugucugaugaggccguuaggccgaaagccaagc

SEQ ID NO: 11909 - RNA, 38 nt, Artificial Sequence
  Description of Artificial Sequence:  Enzymatic Nucleic Acid
uguggacccugaugaggccguuaggccgaaauguugcc

SEQ ID NO: 11910 - RNA, 38 nt, Artificial Sequence
  Description of Artificial Sequence:  Enzymatic Nucleic Acid
cccaugugcugaugaggccguuaggccgaaaccgaugu

SEQ ID NO: 11911 - RNA, 38 nt, Artificial Sequence
  Description of Artificial Sequence:  Enzymatic Nucleic Acid
gugugagucugaugaggccguuaggccgaaauucgccc

SEQ ID NO: 11912 - RNA, 38 nt, Artificial Sequence
  Description of Artificial Sequence:  Enzymatic Nucleic Acid
acuggugucugaugaggccguuaggccgaaagugauuc

SEQ ID NO: 11913 - RNA, 38 nt, Artificial Sequence
  Description of Artificial Sequence:  Enzymatic Nucleic Acid
uucuugcacugaugaggccguuaggccgaaacuggugu

SEQ ID NO: 11914 - RNA, 38 nt, Artificial Sequence
  Description of Artificial Sequence:  Enzymatic Nucleic Acid
guucuugccugaugaggccguuaggccgaaaacuggug

SEQ ID NO: 11915 - RNA, 38 nt, Artificial Sequence
  Description of Artificial Sequence:  Enzymatic Nucleic Acid
gagcaucccugaugaggccguuaggccgaaaguucuug

SEQ ID NO: 11916 - RNA, 38 nt, Artificial Sequence
  Description of Artificial Sequence:  Enzymatic Nucleic Acid
uuuccaaacugaugaggccguuaggccgaaagcaucca

SEQ ID NO: 11917 - RNA, 38 nt, Artificial Sequence
  Description of Artificial Sequence:  Enzymatic Nucleic Acid
aguuuccacugaugaggccguuaggccgaaagagcauc

SEQ ID NO: 11918 - RNA, 38 nt, Artificial Sequence
  Description of Artificial Sequence:  Enzymatic Nucleic Acid
caguuucccugaugaggccguuaggccgaaaagagcau

SEQ ID NO: 11919 - RNA, 38 nt, Artificial Sequence
  Description of Artificial Sequence:  Enzymatic Nucleic Acid
uguuagaacugaugaggccguuaggccgaaacauggug

SEQ ID NO: 11920 - RNA, 38 nt, Artificial Sequence
  Description of Artificial Sequence:  Enzymatic Nucleic Acid
cuguuagacugaugaggccguuaggccgaaaacauggu

SEQ ID NO: 11921 - RNA, 38 nt, Artificial Sequence
  Description of Artificial Sequence:  Enzymatic Nucleic Acid
gcuguuagcugaugaggccguuaggccgaaaaacaugg

SEQ ID NO: 11922 - RNA, 38 nt, Artificial Sequence
  Description of Artificial Sequence:  Enzymatic Nucleic Acid
ugcuguuacugaugaggccguuaggccgaaaaaacaug

SEQ ID NO: 11923 - RNA, 38 nt, Artificial Sequence
  Description of Artificial Sequence:  Enzymatic Nucleic Acid
ugugcugucugaugaggccguuaggccgaaagaaaaca

SEQ ID NO: 11924 - RNA, 38 nt, Artificial Sequence
  Description of Artificial Sequence:  Enzymatic Nucleic Acid
acaaucaacugaugaggccguuaggccgaaaugucauu

SEQ ID NO: 11925 - RNA, 38 nt, Artificial Sequence
  Description of Artificial Sequence:  Enzymatic Nucleic Acid
ccacaauccugaugaggccguuaggccgaaagauguca

SEQ ID NO: 11926 - RNA, 38 nt, Artificial Sequence
  Description of Artificial Sequence:  Enzymatic Nucleic Acid
aaugccaccugaugaggccguuaggccgaaaucaagau

SEQ ID NO: 11927 - RNA, 38 nt, Artificial Sequence
  Description of Artificial Sequence:  Enzymatic Nucleic Acid
cauucugacugaugaggccguuaggccgaaaugccaca

SEQ ID NO: 11928 - RNA, 38 nt, Artificial Sequence
  Description of Artificial Sequence:  Enzymatic Nucleic Acid
gcauucugcugaugaggccguuaggccgaaaaugccac

SEQ ID NO: 11929 - RNA, 38 nt, Artificial Sequence
  Description of Artificial Sequence:  Enzymatic Nucleic Acid
ggcauucucugaugaggccguuaggccgaaaaaugcca

SEQ ID NO: 11930 - RNA, 38 nt, Artificial Sequence
  Description of Artificial Sequence:  Enzymatic Nucleic Acid
ccugcagacugaugaggccguuaggccgaaaggcauuc

SEQ ID NO: 11931 - RNA, 38 nt, Artificial Sequence
  Description of Artificial Sequence:  Enzymatic Nucleic Acid
guccugcacugaugaggccguuaggccgaaagaggcau

SEQ ID NO: 11932 - RNA, 38 nt, Artificial Sequence
  Description of Artificial Sequence:  Enzymatic Nucleic Acid
agcaaacacugaugaggccguuaggccgaaagucgccu

SEQ ID NO: 11933 - RNA, 38 nt, Artificial Sequence
  Description of Artificial Sequence:  Enzymatic Nucleic Acid
gcagagcacugaugaggccguuaggccgaaacauaguc

SEQ ID NO: 11934 - RNA, 38 nt, Artificial Sequence
  Description of Artificial Sequence:  Enzymatic Nucleic Acid
agcagagccugaugaggccguuaggccgaaaacauagu

SEQ ID NO: 11935 - RNA, 38 nt, Artificial Sequence
  Description of Artificial Sequence:  Enzymatic Nucleic Acid
cuugagcacugaugaggccguuaggccgaaagcaaaca

SEQ ID NO: 11936 - RNA, 38 nt, Artificial Sequence
  Description of Artificial Sequence:  Enzymatic Nucleic Acid
cuuaucuucugaugaggccguuaggccgaaagcagagc

SEQ ID NO: 11937 - RNA, 38 nt, Artificial Sequence
  Description of Artificial Sequence:  Enzymatic Nucleic Acid
ggucuucucugaugaggccguuaggccgaaaucuugag

SEQ ID NO: 11938 - RNA, 38 nt, Artificial Sequence
  Description of Artificial Sequence:  Enzymatic Nucleic Acid
gaccaggccugaugaggccguuaggccgaaaugucuuu

SEQ ID NO: 11939 - RNA, 38 nt, Artificial Sequence
  Description of Artificial Sequence:  Enzymatic Nucleic Acid
agcuguuucugaugaggccguuaggccgaaaccaggca

SEQ ID NO: 11940 - RNA, 38 nt, Artificial Sequence
  Description of Artificial Sequence:  Enzymatic Nucleic Acid
aggaugaucugaugaggccguuaggccgaaagcuguuu

SEQ ID NO: 11941 - RNA, 38 nt, Artificial Sequence
  Description of Artificial Sequence:  Enzymatic Nucleic Acid
ucuaggaucugaugaggccguuaggccgaaaugagcug

SEQ ID NO: 11942 - RNA, 38 nt, Artificial Sequence
  Description of Artificial Sequence:  Enzymatic Nucleic Acid
cgcucuagcugaugaggccguuaggccgaaaugaugag

SEQ ID NO: 11943 - RNA, 38 nt, Artificial Sequence
  Description of Artificial Sequence:  Enzymatic Nucleic Acid
augcgcuccugaugaggccguuaggccgaaaggaugau

SEQ ID NO: 11944 - RNA, 38 nt, Artificial Sequence
  Description of Artificial Sequence:  Enzymatic Nucleic Acid
uuuccggucugaugaggccguuaggccgaaaucauggg

SEQ ID NO: 11945 - RNA, 38 nt, Artificial Sequence
  Description of Artificial Sequence:  Enzymatic Nucleic Acid
auucuccacugaugaggccguuaggccgaaauuuccgg

SEQ ID NO: 11946 - RNA, 38 nt, Artificial Sequence
  Description of Artificial Sequence:  Enzymatic Nucleic Acid
uguugucucugaugaggccguuaggccgaaauucucca

SEQ ID NO: 11947 - RNA, 38 nt, Artificial Sequence
  Description of Artificial Sequence:  Enzymatic Nucleic Acid
gucucgcccugaugaggccguuaggccgaaaugguugu

SEQ ID NO: 11948 - RNA, 38 nt, Artificial Sequence
  Description of Artificial Sequence:  Enzymatic Nucleic Acid
gucacuuccugaugaggccguuaggccgaaauggucuc

SEQ ID NO: 11949 - RNA, 38 nt, Artificial Sequence
  Description of Artificial Sequence:  Enzymatic Nucleic Acid
ugcugggccugaugaggccguuaggccgaaagucacuu

SEQ ID NO: 11950 - RNA, 38 nt, Artificial Sequence
  Description of Artificial Sequence:  Enzymatic Nucleic Acid
gauuuccacugaugaggccguuaggccgaaaugcuggg

SEQ ID NO: 11951 - RNA, 38 nt, Artificial Sequence
  Description of Artificial Sequence:  Enzymatic Nucleic Acid
ugggguagcugaugaggccguuaggccgaaauuuccag

SEQ ID NO: 11952 - RNA, 38 nt, Artificial Sequence
  Description of Artificial Sequence:  Enzymatic Nucleic Acid
guguggggcugaugaggccguuaggccgaaaggauuuc

SEQ ID NO: 11953 - RNA, 38 nt, Artificial Sequence
  Description of Artificial Sequence:  Enzymatic Nucleic Acid
aaccaugucugaugaggccguuaggccgaaaugugugg

SEQ ID NO: 11954 - RNA, 38 nt, Artificial Sequence
  Description of Artificial Sequence:  Enzymatic Nucleic Acid
gaaccaugcugaugaggccguuaggccgaaaaugugug

SEQ ID NO: 11955 - RNA, 38 nt, Artificial Sequence
  Description of Artificial Sequence:  Enzymatic Nucleic Acid
ugucuuugcugaugaggccguuaggccgaaaccaugua

SEQ ID NO: 11956 - RNA, 38 nt, Artificial Sequence
  Description of Artificial Sequence:  Enzymatic Nucleic Acid
uugucuuucugaugaggccguuaggccgaaaaccaugu

SEQ ID NO: 11957 - RNA, 38 nt, Artificial Sequence
  Description of Artificial Sequence:  Enzymatic Nucleic Acid
gaaucuuccugaugaggccguuaggccgaaaccagggu

SEQ ID NO: 11958 - RNA, 38 nt, Artificial Sequence
  Description of Artificial Sequence:  Enzymatic Nucleic Acid
aaugccugcugaugaggccguuaggccgaaaucuucua

SEQ ID NO: 11959 - RNA, 38 nt, Artificial Sequence
  Description of Artificial Sequence:  Enzymatic Nucleic Acid
caaugccucugaugaggccguuaggccgaaaaucuucu

SEQ ID NO: 11960 - RNA, 38 nt, Artificial Sequence
  Description of Artificial Sequence:  Enzymatic Nucleic Acid
cucaguaccugaugaggccguuaggccgaaaugccuga

SEQ ID NO: 11961 - RNA, 38 nt, Artificial Sequence
  Description of Artificial Sequence:  Enzymatic Nucleic Acid
ucucucagcugaugaggccguuaggccgaaacaaugcc

SEQ ID NO: 11962 - RNA, 38 nt, Artificial Sequence
  Description of Artificial Sequence:  Enzymatic Nucleic Acid
ccugcggacugaugaggccguuaggccgaaagucaggu

SEQ ID NO: 11963 - RNA, 38 nt, Artificial Sequence
  Description of Artificial Sequence:  Enzymatic Nucleic Acid
acccugcgcugaugaggccguuaggccgaaauagucag

SEQ ID NO: 11964 - RNA, 38 nt, Artificial Sequence
  Description of Artificial Sequence:  Enzymatic Nucleic Acid
cagguguacugaugaggccguuaggccgaaaggccucc

SEQ ID NO: 11965 - RNA, 38 nt, Artificial Sequence
  Description of Artificial Sequence:  Enzymatic Nucleic Acid
cagccaagcugaugaggccguuaggccgaaacauugca

SEQ ID NO: 11966 - RNA, 38 nt, Artificial Sequence
  Description of Artificial Sequence:  Enzymatic Nucleic Acid
gcacagcccugaugaggccguuaggccgaaaggacauu

SEQ ID NO: 11967 - RNA, 38 nt, Artificial Sequence
  Description of Artificial Sequence:  Enzymatic Nucleic Acid
auuaugaacugaugaggccguuaggccgaaagcgucuc

SEQ ID NO: 11968 - RNA, 38 nt, Artificial Sequence
  Description of Artificial Sequence:  Enzymatic Nucleic Acid
cuauuaugcugaugaggccguuaggccgaaagagcguc

SEQ ID NO: 11969 - RNA, 38 nt, Artificial Sequence
  Description of Artificial Sequence:  Enzymatic Nucleic Acid
ucuauuaucugaugaggccguuaggccgaaaagagcgu

SEQ ID NO: 11970 - RNA, 38 nt, Artificial Sequence
  Description of Artificial Sequence:  Enzymatic Nucleic Acid
ccuucuaucugaugaggccguuaggccgaaaugaagag

SEQ ID NO: 11971 - RNA, 38 nt, Artificial Sequence
  Description of Artificial Sequence:  Enzymatic Nucleic Acid
ugacuucccugaugaggccguuaggccgaaaguugguc

SEQ ID NO: 11972 - RNA, 38 nt, Artificial Sequence
  Description of Artificial Sequence:  Enzymatic Nucleic Acid
aggauaaucugaugaggccguuaggccgaaacuuccaa

SEQ ID NO: 11973 - RNA, 38 nt, Artificial Sequence
  Description of Artificial Sequence:  Enzymatic Nucleic Acid
acgaggaucugaugaggccguuaggccgaaaugacuuc

SEQ ID NO: 11974 - RNA, 38 nt, Artificial Sequence
  Description of Artificial Sequence:  Enzymatic Nucleic Acid
gacgaggacugaugaggccguuaggccgaaaaugacuu

SEQ ID NO: 11975 - RNA, 38 nt, Artificial Sequence
  Description of Artificial Sequence:  Enzymatic Nucleic Acid
ccgacgagcugaugaggccguuaggccgaaauaaugac

SEQ ID NO: 11976 - RNA, 38 nt, Artificial Sequence
  Description of Artificial Sequence:  Enzymatic Nucleic Acid
gugccgaccugaugaggccguuaggccgaaaggauaau

SEQ ID NO: 11977 - RNA, 38 nt, Artificial Sequence
  Description of Artificial Sequence:  Enzymatic Nucleic Acid
gcagugcccugaugaggccguuaggccgaaacgaggau

SEQ ID NO: 11978 - RNA, 38 nt, Artificial Sequence
  Description of Artificial Sequence:  Enzymatic Nucleic Acid
aacauggccugaugaggccguuaggccgaaaucacugc

SEQ ID NO: 11979 - RNA, 38 nt, Artificial Sequence
  Description of Artificial Sequence:  Enzymatic Nucleic Acid
ggagccagcugaugaggccguuaggccgaaagaacaug

SEQ ID NO: 11980 - RNA, 38 nt, Artificial Sequence
  Description of Artificial Sequence:  Enzymatic Nucleic Acid
aggagccacugaugaggccguuaggccgaaaagaacau

SEQ ID NO: 11981 - RNA, 38 nt, Artificial Sequence
  Description of Artificial Sequence:  Enzymatic Nucleic Acid
augacaagcugaugaggccguuaggccgaaaggagcca

SEQ ID NO: 11982 - RNA, 38 nt, Artificial Sequence
  Description of Artificial Sequence:  Enzymatic Nucleic Acid
aaugacaacugaugaggccguuaggccgaaaaggagcc

SEQ ID NO: 11983 - RNA, 38 nt, Artificial Sequence
  Description of Artificial Sequence:  Enzymatic Nucleic Acid
acaaugaccugaugaggccguuaggccgaaagaaggag

SEQ ID NO: 11984 - RNA, 38 nt, Artificial Sequence
  Description of Artificial Sequence:  Enzymatic Nucleic Acid
aggacaaucugaugaggccguuaggccgaaacaagaag

SEQ ID NO: 11985 - RNA, 38 nt, Artificial Sequence
  Description of Artificial Sequence:  Enzymatic Nucleic Acid
cguaggaccugaugaggccguuaggccgaaaugacaag

SEQ ID NO: 11986 - RNA, 38 nt, Artificial Sequence
  Description of Artificial Sequence:  Enzymatic Nucleic Acid
guccguagcugaugaggccguuaggccgaaacaaugac

SEQ ID NO: 11987 - RNA, 38 nt, Artificial Sequence
  Description of Artificial Sequence:  Enzymatic Nucleic Acid
acgguccgcugaugaggccguuaggccgaaaggacaau

SEQ ID NO: 11988 - RNA, 38 nt, Artificial Sequence
  Description of Artificial Sequence:  Enzymatic Nucleic Acid
gcccgcuucugaugaggccguuaggccgaaacgguccg

SEQ ID NO: 11989 - RNA, 38 nt, Artificial Sequence
  Description of Artificial Sequence:  Enzymatic Nucleic Acid
uagacaagcugaugaggccguuaggccgaaagccuguc

SEQ ID NO: 11990 - RNA, 38 nt, Artificial Sequence
  Description of Artificial Sequence:  Enzymatic Nucleic Acid
caauagaccugaugaggccguuaggccgaaaguagccu

SEQ ID NO: 11991 - RNA, 38 nt, Artificial Sequence
  Description of Artificial Sequence:  Enzymatic Nucleic Acid
ugacaauacugaugaggccguuaggccgaaacaaguag

SEQ ID NO: 11992 - RNA, 38 nt, Artificial Sequence
  Description of Artificial Sequence:  Enzymatic Nucleic Acid
caugacaacugaugaggccguuaggccgaaagacaagu

SEQ ID NO: 11993 - RNA, 38 nt, Artificial Sequence
  Description of Artificial Sequence:  Enzymatic Nucleic Acid
uccaugaccugaugaggccguuaggccgaaauagacaa

SEQ ID NO: 11994 - RNA, 38 nt, Artificial Sequence
  Description of Artificial Sequence:  Enzymatic Nucleic Acid
ggauccaucugaugaggccguuaggccgaaacaauaga

SEQ ID NO: 11995 - RNA, 38 nt, Artificial Sequence
  Description of Artificial Sequence:  Enzymatic Nucleic Acid
ccaagggccugaugaggccguuaggccgaaauucaucu

SEQ ID NO: 11996 - RNA, 38 nt, Artificial Sequence
  Description of Artificial Sequence:  Enzymatic Nucleic Acid
gcucaucccugaugaggccguuaggccgaaagggcaau

SEQ ID NO: 11997 - RNA, 38 nt, Artificial Sequence
  Description of Artificial Sequence:  Enzymatic Nucleic Acid
cauaaggccugaugaggccguuaggccgaaagcguuca

SEQ ID NO: 11998 - RNA, 38 nt, Artificial Sequence
  Description of Artificial Sequence:  Enzymatic Nucleic Acid
ggcaucaucugaugaggccguuaggccgaaaggcaagc

SEQ ID NO: 11999 - RNA, 38 nt, Artificial Sequence
  Description of Artificial Sequence:  Enzymatic Nucleic Acid
uggcaucacugaugaggccguuaggccgaaaaggcaag

SEQ ID NO: 12000 - RNA, 38 nt, Artificial Sequence
  Description of Artificial Sequence:  Enzymatic Nucleic Acid
cccuggggcugaugaggccguuaggccgaaauucccac

SEQ ID NO: 12001 - RNA, 38 nt, Artificial Sequence
  Description of Artificial Sequence:  Enzymatic Nucleic Acid
ucccugggcugaugaggccguuaggccgaaaauuccca

SEQ ID NO: 12002 - RNA, 38 nt, Artificial Sequence
  Description of Artificial Sequence:  Enzymatic Nucleic Acid
gguuuucccugaugaggccguuaggccgaaaguuucag

SEQ ID NO: 12003 - RNA, 38 nt, Artificial Sequence
  Description of Artificial Sequence:  Enzymatic Nucleic Acid
gcggccaacugaugaggccguuaggccgaaagguuuuc

SEQ ID NO: 12004 - RNA, 38 nt, Artificial Sequence
  Description of Artificial Sequence:  Enzymatic Nucleic Acid
ccgcggcccugaugaggccguuaggccgaaagagguuu

SEQ ID NO: 12005 - RNA, 38 nt, Artificial Sequence
  Description of Artificial Sequence:  Enzymatic Nucleic Acid
cuuggccgcugaugaggccguuaggccgaaaggcaccg

SEQ ID NO: 12006 - RNA, 38 nt, Artificial Sequence
  Description of Artificial Sequence:  Enzymatic Nucleic Acid
acuuggcccugaugaggccguuaggccgaaaaggcacc

SEQ ID NO: 12007 - RNA, 38 nt, Artificial Sequence
  Description of Artificial Sequence:  Enzymatic Nucleic Acid
ucugccuccugaugaggccguuaggccgaaaucacuug

SEQ ID NO: 12008 - RNA, 38 nt, Artificial Sequence
  Description of Artificial Sequence:  Enzymatic Nucleic Acid
aauuccaacugaugaggccguuaggccgaaagcgucug

SEQ ID NO: 12009 - RNA, 38 nt, Artificial Sequence
  Description of Artificial Sequence:  Enzymatic Nucleic Acid
caauuccacugaugaggccguuaggccgaaaagcgucu

SEQ ID NO: 12010 - RNA, 38 nt, Artificial Sequence
  Description of Artificial Sequence:  Enzymatic Nucleic Acid
ucaauucccugaugaggccguuaggccgaaaaagcguc

SEQ ID NO: 12011 - RNA, 38 nt, Artificial Sequence
  Description of Artificial Sequence:  Enzymatic Nucleic Acid
uguuuugccugaugaggccguuaggccgaaagucgcug

SEQ ID NO: 12012 - RNA, 38 nt, Artificial Sequence
  Description of Artificial Sequence:  Enzymatic Nucleic Acid
uugacggccugaugaggccguuaggccgaaacuguuuu

SEQ ID NO: 12013 - RNA, 38 nt, Artificial Sequence
  Description of Artificial Sequence:  Enzymatic Nucleic Acid
aacaucuucugaugaggccguuaggccgaaacggcuac

SEQ ID NO: 12014 - RNA, 38 nt, Artificial Sequence
  Description of Artificial Sequence:  Enzymatic Nucleic Acid
cuucuuuccugaugaggccguuaggccgaaacaucuug

SEQ ID NO: 12015 - RNA, 38 nt, Artificial Sequence
  Description of Artificial Sequence:  Enzymatic Nucleic Acid
gagggcuccugaugaggccguuaggccgaaaugcucgc

SEQ ID NO: 12016 - RNA, 38 nt, Artificial Sequence
  Description of Artificial Sequence:  Enzymatic Nucleic Acid
ucagacaucugaugaggccguuaggccgaaagggcucg

SEQ ID NO: 12017 - RNA, 38 nt, Artificial Sequence
  Description of Artificial Sequence:  Enzymatic Nucleic Acid
ugaguucacugaugaggccguuaggccgaaacaugagg

SEQ ID NO: 12018 - RNA, 38 nt, Artificial Sequence
  Description of Artificial Sequence:  Enzymatic Nucleic Acid
uggaugagcugaugaggccguuaggccgaaaucuugag

SEQ ID NO: 12019 - RNA, 38 nt, Artificial Sequence
  Description of Artificial Sequence:  Enzymatic Nucleic Acid
auguggaucugaugaggccguuaggccgaaaggaucuu

SEQ ID NO: 12020 - RNA, 38 nt, Artificial Sequence
  Description of Artificial Sequence:  Enzymatic Nucleic Acid
ccaaugugcugaugaggccguuaggccgaaaugaggau

SEQ ID NO: 12021 - RNA, 38 nt, Artificial Sequence
  Description of Artificial Sequence:  Enzymatic Nucleic Acid
uggugacccugaugaggccguuaggccgaaauguggau

SEQ ID NO: 12022 - RNA, 38 nt, Artificial Sequence
  Description of Artificial Sequence:  Enzymatic Nucleic Acid
gagauggucugaugaggccguuaggccgaaaccaaugu

SEQ ID NO: 12023 - RNA, 38 nt, Artificial Sequence
  Description of Artificial Sequence:  Enzymatic Nucleic Acid
gcgccuagcugaugaggccguuaggccgaaagguucac

SEQ ID NO: 12024 - RNA, 38 nt, Artificial Sequence
  Description of Artificial Sequence:  Enzymatic Nucleic Acid
caggcgcccugaugaggccguuaggccgaaaggagguu

SEQ ID NO: 12025 - RNA, 38 nt, Artificial Sequence
  Description of Artificial Sequence:  Enzymatic Nucleic Acid
caccaugacugaugaggccguuaggccgaaaggcccuc

SEQ ID NO: 12026 - RNA, 38 nt, Artificial Sequence
  Description of Artificial Sequence:  Enzymatic Nucleic Acid
aucaccaucugaugaggccguuaggccgaaagaggccc

SEQ ID NO: 12027 - RNA, 38 nt, Artificial Sequence
  Description of Artificial Sequence:  Enzymatic Nucleic Acid
acuugcagcugaugaggccguuaggccgaaauuccaca

SEQ ID NO: 12028 - RNA, 38 nt, Artificial Sequence
  Description of Artificial Sequence:  Enzymatic Nucleic Acid
aacuugcacugaugaggccguuaggccgaaaauuccac

SEQ ID NO: 12029 - RNA, 38 nt, Artificial Sequence
  Description of Artificial Sequence:  Enzymatic Nucleic Acid
gguuuccacugaugaggccguuaggccgaaacuugcag

SEQ ID NO: 12030 - RNA, 38 nt, Artificial Sequence
  Description of Artificial Sequence:  Enzymatic Nucleic Acid
agguuucccugaugaggccguuaggccgaaaacuugca

SEQ ID NO: 12031 - RNA, 38 nt, Artificial Sequence
  Description of Artificial Sequence:  Enzymatic Nucleic Acid
uaaguugacugaugaggccguuaggccgaaagguuucc

SEQ ID NO: 12032 - RNA, 38 nt, Artificial Sequence
  Description of Artificial Sequence:  Enzymatic Nucleic Acid
aguaaguucugaugaggccguuaggccgaaauagguuu

SEQ ID NO: 12033 - RNA, 38 nt, Artificial Sequence
  Description of Artificial Sequence:  Enzymatic Nucleic Acid
ccguaagucugaugaggccguuaggccgaaaguugaua

SEQ ID NO: 12034 - RNA, 38 nt, Artificial Sequence
  Description of Artificial Sequence:  Enzymatic Nucleic Acid
cccguaagcugaugaggccguuaggccgaaaaguugau

SEQ ID NO: 12035 - RNA, 38 nt, Artificial Sequence
  Description of Artificial Sequence:  Enzymatic Nucleic Acid
ugccccgucugaugaggccguuaggccgaaaguaaguu

SEQ ID NO: 12036 - RNA, 38 nt, Artificial Sequence
  Description of Artificial Sequence:  Enzymatic Nucleic Acid
uugccccgcugaugaggccguuaggccgaaaaguaagu

SEQ ID NO: 12037 - RNA, 38 nt, Artificial Sequence
  Description of Artificial Sequence:  Enzymatic Nucleic Acid
agggaacacugaugaggccguuaggccgaaauucauuu

SEQ ID NO: 12038 - RNA, 38 nt, Artificial Sequence
  Description of Artificial Sequence:  Enzymatic Nucleic Acid
uagggaaccugaugaggccguuaggccgaaaauucauu

SEQ ID NO: 12039 - RNA, 38 nt, Artificial Sequence
  Description of Artificial Sequence:  Enzymatic Nucleic Acid
uuauagggcugaugaggccguuaggccgaaacaaauuc

SEQ ID NO: 12040 - RNA, 38 nt, Artificial Sequence
  Description of Artificial Sequence:  Enzymatic Nucleic Acid
cuuauaggcugaugaggccguuaggccgaaaacaaauu

SEQ ID NO: 12041 - RNA, 38 nt, Artificial Sequence
  Description of Artificial Sequence:  Enzymatic Nucleic Acid
ugcucuuacugaugaggccguuaggccgaaagggaaca

SEQ ID NO: 12042 - RNA, 38 nt, Artificial Sequence
  Description of Artificial Sequence:  Enzymatic Nucleic Acid
uuugcucucugaugaggccguuaggccgaaauagggaa

SEQ ID NO: 12043 - RNA, 38 nt, Artificial Sequence
  Description of Artificial Sequence:  Enzymatic Nucleic Acid
ccuggcggcugaugaggccguuaggccgaaagcgugcc

SEQ ID NO: 12044 - RNA, 38 nt, Artificial Sequence
  Description of Artificial Sequence:  Enzymatic Nucleic Acid
cccuggcgcugaugaggccguuaggccgaaaagcgugc

SEQ ID NO: 12045 - RNA, 38 nt, Artificial Sequence
  Description of Artificial Sequence:  Enzymatic Nucleic Acid
ccccaacgcugaugaggccguuaggccgaaaguccuug

SEQ ID NO: 12046 - RNA, 38 nt, Artificial Sequence
  Description of Artificial Sequence:  Enzymatic Nucleic Acid
agcucccccugaugaggccguuaggccgaaacguaguc

SEQ ID NO: 12047 - RNA, 38 nt, Artificial Sequence
  Description of Artificial Sequence:  Enzymatic Nucleic Acid
uccacggacugaugaggccguuaggccgaaagcucccc

SEQ ID NO: 12048 - RNA, 38 nt, Artificial Sequence
  Description of Artificial Sequence:  Enzymatic Nucleic Acid
gauccacgcugaugaggccguuaggccgaaagagcucc

SEQ ID NO: 12049 - RNA, 38 nt, Artificial Sequence
  Description of Artificial Sequence:  Enzymatic Nucleic Acid
ucuuuucacugaugaggccguuaggccgaaauccacgg

SEQ ID NO: 12050 - RNA, 38 nt, Artificial Sequence
  Description of Artificial Sequence:  Enzymatic Nucleic Acid
ugcugucccugaugaggccguuaggccgaaagcgucuu

SEQ ID NO: 12051 - RNA, 38 nt, Artificial Sequence
  Description of Artificial Sequence:  Enzymatic Nucleic Acid
cugcuggucugaugaggccguuaggccgaaaugcuguc

SEQ ID NO: 12052 - RNA, 38 nt, Artificial Sequence
  Description of Artificial Sequence:  Enzymatic Nucleic Acid
agcuggcacugaugaggccguuaggccgaaagcucugg

SEQ ID NO: 12053 - RNA, 38 nt, Artificial Sequence
  Description of Artificial Sequence:  Enzymatic Nucleic Acid
caaagccucugaugaggccguuaggccgaaagcuggca

SEQ ID NO: 12054 - RNA, 38 nt, Artificial Sequence
  Description of Artificial Sequence:  Enzymatic Nucleic Acid
ccucaacacugaugaggccguuaggccgaaagccugag

SEQ ID NO: 12055 - RNA, 38 nt, Artificial Sequence
  Description of Artificial Sequence:  Enzymatic Nucleic Acid
uccucaaccugaugaggccguuaggccgaaaagccuga

SEQ ID NO: 12056 - RNA, 38 nt, Artificial Sequence
  Description of Artificial Sequence:  Enzymatic Nucleic Acid
uucuccuccugaugaggccguuaggccgaaacaaagcc

SEQ ID NO: 12057 - RNA, 38 nt, Artificial Sequence
  Description of Artificial Sequence:  Enzymatic Nucleic Acid
cacugagccugaugaggccguuaggccgaaauuucucc

SEQ ID NO: 12058 - RNA, 38 nt, Artificial Sequence
  Description of Artificial Sequence:  Enzymatic Nucleic Acid
acaucacucugaugaggccguuaggccgaaagcgauuu

SEQ ID NO: 12059 - RNA, 38 nt, Artificial Sequence
  Description of Artificial Sequence:  Enzymatic Nucleic Acid
uucuucagcugaugaggccguuaggccgaaagcuucuu

SEQ ID NO: 12060 - RNA, 38 nt, Artificial Sequence
  Description of Artificial Sequence:  Enzymatic Nucleic Acid
guucuucacugaugaggccguuaggccgaaaagcuucu

SEQ ID NO: 12061 - RNA, 38 nt, Artificial Sequence
  Description of Artificial Sequence:  Enzymatic Nucleic Acid
aguccuugcugaugaggccguuaggccgaaacaguucu

SEQ ID NO: 12062 - RNA, 38 nt, Artificial Sequence
  Description of Artificial Sequence:  Enzymatic Nucleic Acid
aggucaggcugaugaggccguuaggccgaaaguccuug

SEQ ID NO: 12063 - RNA, 38 nt, Artificial Sequence
  Description of Artificial Sequence:  Enzymatic Nucleic Acid
uugaugcccugaugaggccguuaggccgaaagaacucc

SEQ ID NO: 12064 - RNA, 38 nt, Artificial Sequence
  Description of Artificial Sequence:  Enzymatic Nucleic Acid
acuuccuucugaugaggccguuaggccgaaaugccaag

SEQ ID NO: 12065 - RNA, 38 nt, Artificial Sequence
  Description of Artificial Sequence:  Enzymatic Nucleic Acid
ccuguggacugaugaggccguuaggccgaaacacuucc

SEQ ID NO: 12066 - RNA, 38 nt, Artificial Sequence
  Description of Artificial Sequence:  Enzymatic Nucleic Acid
gauaggagcugaugaggccguuaggccgaaauguuucg

SEQ ID NO: 12067 - RNA, 38 nt, Artificial Sequence
  Description of Artificial Sequence:  Enzymatic Nucleic Acid
cgauaggacugaugaggccguuaggccgaaaauguuuc

SEQ ID NO: 12068 - RNA, 38 nt, Artificial Sequence
  Description of Artificial Sequence:  Enzymatic Nucleic Acid
uccgauagcugaugaggccguuaggccgaaagaauguu

SEQ ID NO: 12069 - RNA, 38 nt, Artificial Sequence
  Description of Artificial Sequence:  Enzymatic Nucleic Acid
uucuccgacugaugaggccguuaggccgaaaggagaau

SEQ ID NO: 12070 - RNA, 38 nt, Artificial Sequence
  Description of Artificial Sequence:  Enzymatic Nucleic Acid
ucuucucccugaugaggccguuaggccgaaauaggaga

SEQ ID NO: 12071 - RNA, 38 nt, Artificial Sequence
  Description of Artificial Sequence:  Enzymatic Nucleic Acid
cagaucuucugaugaggccguuaggccgaaaccacauu

SEQ ID NO: 12072 - RNA, 38 nt, Artificial Sequence
  Description of Artificial Sequence:  Enzymatic Nucleic Acid
acagaucucugaugaggccguuaggccgaaaaccacau

SEQ ID NO: 12073 - RNA, 38 nt, Artificial Sequence
  Description of Artificial Sequence:  Enzymatic Nucleic Acid
aagucacacugaugaggccguuaggccgaaaucuuaac

SEQ ID NO: 12074 - RNA, 38 nt, Artificial Sequence
  Description of Artificial Sequence:  Enzymatic Nucleic Acid
ccaagccgcugaugaggccguuaggccgaaagucacag

SEQ ID NO: 12075 - RNA, 38 nt, Artificial Sequence
  Description of Artificial Sequence:  Enzymatic Nucleic Acid
cccgggcccugaugaggccguuaggccgaaagccgaag

SEQ ID NO: 12076 - RNA, 38 nt, Artificial Sequence
  Description of Artificial Sequence:  Enzymatic Nucleic Acid
ucuuuauacugaugaggccguuaggccgaaaugucccg

SEQ ID NO: 12077 - RNA, 38 nt, Artificial Sequence
  Description of Artificial Sequence:  Enzymatic Nucleic Acid
gucuuuaucugaugaggccguuaggccgaaaauguccc

SEQ ID NO: 12078 - RNA, 38 nt, Artificial Sequence
  Description of Artificial Sequence:  Enzymatic Nucleic Acid
ggucuuuacugaugaggccguuaggccgaaaaaugucc

SEQ ID NO: 12079 - RNA, 38 nt, Artificial Sequence
  Description of Artificial Sequence:  Enzymatic Nucleic Acid
cgggucuucugaugaggccguuaggccgaaauaaaugu

SEQ ID NO: 12080 - RNA, 38 nt, Artificial Sequence
  Description of Artificial Sequence:  Enzymatic Nucleic Acid
ucugacaucugaugaggccguuaggccgaaauccgggu

SEQ ID NO: 12081 - RNA, 38 nt, Artificial Sequence
  Description of Artificial Sequence:  Enzymatic Nucleic Acid
uucugacacugaugaggccguuaggccgaaaauccggg

SEQ ID NO: 12082 - RNA, 38 nt, Artificial Sequence
  Description of Artificial Sequence:  Enzymatic Nucleic Acid
uucaaaggcugaugaggccguuaggccgaaagucgggc

SEQ ID NO: 12083 - RNA, 38 nt, Artificial Sequence
  Description of Artificial Sequence:  Enzymatic Nucleic Acid
ccacuucacugaugaggccguuaggccgaaagggaguc

SEQ ID NO: 12084 - RNA, 38 nt, Artificial Sequence
  Description of Artificial Sequence:  Enzymatic Nucleic Acid
uccacuuccugaugaggccguuaggccgaaaagggagu

SEQ ID NO: 12085 - RNA, 38 nt, Artificial Sequence
  Description of Artificial Sequence:  Enzymatic Nucleic Acid
cugucaaacugaugaggccguuaggccgaaaugguuuc

SEQ ID NO: 12086 - RNA, 38 nt, Artificial Sequence
  Description of Artificial Sequence:  Enzymatic Nucleic Acid
ucugucaacugaugaggccguuaggccgaaaaugguuu

SEQ ID NO: 12087 - RNA, 38 nt, Artificial Sequence
  Description of Artificial Sequence:  Enzymatic Nucleic Acid
cucugucacugaugaggccguuaggccgaaaaaugguu

SEQ ID NO: 12088 - RNA, 38 nt, Artificial Sequence
  Description of Artificial Sequence:  Enzymatic Nucleic Acid
acucuguccugaugaggccguuaggccgaaaaaauggu

SEQ ID NO: 12089 - RNA, 38 nt, Artificial Sequence
  Description of Artificial Sequence:  Enzymatic Nucleic Acid
auuguguacugaugaggccguuaggccgaaacucuguc

SEQ ID NO: 12090 - RNA, 38 nt, Artificial Sequence
  Description of Artificial Sequence:  Enzymatic Nucleic Acid
gaauugugcugaugaggccguuaggccgaaauacucug

SEQ ID NO: 12091 - RNA, 38 nt, Artificial Sequence
  Description of Artificial Sequence:  Enzymatic Nucleic Acid
ucgcucugcugaugaggccguuaggccgaaauugugua

SEQ ID NO: 12092 - RNA, 38 nt, Artificial Sequence
  Description of Artificial Sequence:  Enzymatic Nucleic Acid
aucgcucucugaugaggccguuaggccgaaaauugugu

SEQ ID NO: 12093 - RNA, 38 nt, Artificial Sequence
  Description of Artificial Sequence:  Enzymatic Nucleic Acid
caccgaaacugaugaggccguuaggccgaaaccacaca

SEQ ID NO: 12094 - RNA, 38 nt, Artificial Sequence
  Description of Artificial Sequence:  Enzymatic Nucleic Acid
cacaccgacugaugaggccguuaggccgaaagaccaca

SEQ ID NO: 12095 - RNA, 38 nt, Artificial Sequence
  Description of Artificial Sequence:  Enzymatic Nucleic Acid
acacaccgcugaugaggccguuaggccgaaaagaccac

SEQ ID NO: 12096 - RNA, 38 nt, Artificial Sequence
  Description of Artificial Sequence:  Enzymatic Nucleic Acid
aacacacccugaugaggccguuaggccgaaaaagacca

SEQ ID NO: 12097 - RNA, 38 nt, Artificial Sequence
  Description of Artificial Sequence:  Enzymatic Nucleic Acid
cccagagccugaugaggccguuaggccgaaacacaccg

SEQ ID NO: 12098 - RNA, 38 nt, Artificial Sequence
  Description of Artificial Sequence:  Enzymatic Nucleic Acid
auuucccacugaugaggccguuaggccgaaagcaacac

SEQ ID NO: 12099 - RNA, 38 nt, Artificial Sequence
  Description of Artificial Sequence:  Enzymatic Nucleic Acid
aggcaccucugaugaggccguuaggccgaaaggaaaau

SEQ ID NO: 12100 - RNA, 38 nt, Artificial Sequence
  Description of Artificial Sequence:  Enzymatic Nucleic Acid
gaggcacccugaugaggccguuaggccgaaaaggaaaa

SEQ ID NO: 12101 - RNA, 38 nt, Artificial Sequence
  Description of Artificial Sequence:  Enzymatic Nucleic Acid
gguaugggcugaugaggccguuaggccgaaaggcaccu

SEQ ID NO: 12102 - RNA, 38 nt, Artificial Sequence
  Description of Artificial Sequence:  Enzymatic Nucleic Acid
ccccagggcugaugaggccguuaggccgaaauggggag

SEQ ID NO: 12103 - RNA, 38 nt, Artificial Sequence
  Description of Artificial Sequence:  Enzymatic Nucleic Acid
ucuucauccugaugaggccguuaggccgaaaucuugac

SEQ ID NO: 12104 - RNA, 38 nt, Artificial Sequence
  Description of Artificial Sequence:  Enzymatic Nucleic Acid
uccuacaacugaugaggccguuaggccgaaauucuuca

SEQ ID NO: 12105 - RNA, 38 nt, Artificial Sequence
  Description of Artificial Sequence:  Enzymatic Nucleic Acid
cuccuacacugaugaggccguuaggccgaaaauucuuc

SEQ ID NO: 12106 - RNA, 38 nt, Artificial Sequence
  Description of Artificial Sequence:  Enzymatic Nucleic Acid
ucuccuaccugaugaggccguuaggccgaaaaauucuu

SEQ ID NO: 12107 - RNA, 38 nt, Artificial Sequence
  Description of Artificial Sequence:  Enzymatic Nucleic Acid
caaucucccugaugaggccguuaggccgaaacaaaauu

SEQ ID NO: 12108 - RNA, 38 nt, Artificial Sequence
  Description of Artificial Sequence:  Enzymatic Nucleic Acid
cuucuuuccugaugaggccguuaggccgaaaucuccua

SEQ ID NO: 12109 - RNA, 38 nt, Artificial Sequence
  Description of Artificial Sequence:  Enzymatic Nucleic Acid
ccgcauuccugaugaggccguuaggccgaaaguuccuu

SEQ ID NO: 12110 - RNA, 38 nt, Artificial Sequence
  Description of Artificial Sequence:  Enzymatic Nucleic Acid
guagucagcugaugaggccguuaggccgaaagcccgca

SEQ ID NO: 12111 - RNA, 38 nt, Artificial Sequence
  Description of Artificial Sequence:  Enzymatic Nucleic Acid
ggguagugcugaugaggccguuaggccgaaagucagga

SEQ ID NO: 12112 - RNA, 38 nt, Artificial Sequence
  Description of Artificial Sequence:  Enzymatic Nucleic Acid
uucuggggcugaugaggccguuaggccgaaaguguagu

SEQ ID NO: 12113 - RNA, 38 nt, Artificial Sequence
  Description of Artificial Sequence:  Enzymatic Nucleic Acid
cugaaaaccugaugaggccguuaggccgaaagggucuc

SEQ ID NO: 12114 - RNA, 38 nt, Artificial Sequence
  Description of Artificial Sequence:  Enzymatic Nucleic Acid
acucugaacugaugaggccguuaggccgaaacgagggu

SEQ ID NO: 12115 - RNA, 38 nt, Artificial Sequence
  Description of Artificial Sequence:  Enzymatic Nucleic Acid
aacucugacugaugaggccguuaggccgaaaacgaggg

SEQ ID NO: 12116 - RNA, 38 nt, Artificial Sequence
  Description of Artificial Sequence:  Enzymatic Nucleic Acid
caacucugcugaugaggccguuaggccgaaaaacgagg

SEQ ID NO: 12117 - RNA, 38 nt, Artificial Sequence
  Description of Artificial Sequence:  Enzymatic Nucleic Acid
ccaacucucugaugaggccguuaggccgaaaaaacgag

SEQ ID NO: 12118 - RNA, 38 nt, Artificial Sequence
  Description of Artificial Sequence:  Enzymatic Nucleic Acid
gcuccacccugaugaggccguuaggccgaaacucugaa

SEQ ID NO: 12119 - RNA, 38 nt, Artificial Sequence
  Description of Artificial Sequence:  Enzymatic Nucleic Acid
guuucccacugaugaggccguuaggccgaaaugcucca

SEQ ID NO: 12120 - RNA, 38 nt, Artificial Sequence
  Description of Artificial Sequence:  Enzymatic Nucleic Acid
gguuuccccugaugaggccguuaggccgaaaaugcucc

SEQ ID NO: 12121 - RNA, 38 nt, Artificial Sequence
  Description of Artificial Sequence:  Enzymatic Nucleic Acid
gcuugcagcugaugaggccguuaggccgaaagguuucc

SEQ ID NO: 12122 - RNA, 38 nt, Artificial Sequence
  Description of Artificial Sequence:  Enzymatic Nucleic Acid
gaacaauacugaugaggccguuaggccgaaagucuuug

SEQ ID NO: 12123 - RNA, 38 nt, Artificial Sequence
  Description of Artificial Sequence:  Enzymatic Nucleic Acid
aagaacaacugaugaggccguuaggccgaaauagucuu

SEQ ID NO: 12124 - RNA, 38 nt, Artificial Sequence
  Description of Artificial Sequence:  Enzymatic Nucleic Acid
ggaagaaccugaugaggccguuaggccgaaauauaguc

SEQ ID NO: 12125 - RNA, 38 nt, Artificial Sequence
  Description of Artificial Sequence:  Enzymatic Nucleic Acid
auuggaagcugaugaggccguuaggccgaaacaauaua

SEQ ID NO: 12126 - RNA, 38 nt, Artificial Sequence
  Description of Artificial Sequence:  Enzymatic Nucleic Acid
cauuggaacugaugaggccguuaggccgaaaacaauau

SEQ ID NO: 12127 - RNA, 38 nt, Artificial Sequence
  Description of Artificial Sequence:  Enzymatic Nucleic Acid
gacauuggcugaugaggccguuaggccgaaagaacaau

SEQ ID NO: 12128 - RNA, 38 nt, Artificial Sequence
  Description of Artificial Sequence:  Enzymatic Nucleic Acid
ugacauugcugaugaggccguuaggccgaaaagaacaa

SEQ ID NO: 12129 - RNA, 38 nt, Artificial Sequence
  Description of Artificial Sequence:  Enzymatic Nucleic Acid
gugucucucugaugaggccguuaggccgaaacauugga

SEQ ID NO: 12130 - RNA, 38 nt, Artificial Sequence
  Description of Artificial Sequence:  Enzymatic Nucleic Acid
ggcagggacugaugaggccguuaggccgaaaguccaga

SEQ ID NO: 12131 - RNA, 38 nt, Artificial Sequence
  Description of Artificial Sequence:  Enzymatic Nucleic Acid
uaggcaggcugaugaggccguuaggccgaaagagucca

SEQ ID NO: 12132 - RNA, 38 nt, Artificial Sequence
  Description of Artificial Sequence:  Enzymatic Nucleic Acid
aggugaggcugaugaggccguuaggccgaaaggcaggg

SEQ ID NO: 12133 - RNA, 38 nt, Artificial Sequence
  Description of Artificial Sequence:  Enzymatic Nucleic Acid
uuccuccacugaugaggccguuaggccgaaacaggaaa

SEQ ID NO: 12134 - RNA, 38 nt, Artificial Sequence
  Description of Artificial Sequence:  Enzymatic Nucleic Acid
uaaugacucugaugaggccguuaggccgaaauuccugc

SEQ ID NO: 12135 - RNA, 38 nt, Artificial Sequence
  Description of Artificial Sequence:  Enzymatic Nucleic Acid
gagauaaucugaugaggccguuaggccgaaacugauuc

SEQ ID NO: 12136 - RNA, 38 nt, Artificial Sequence
  Description of Artificial Sequence:  Enzymatic Nucleic Acid
cuggagaucugaugaggccguuaggccgaaaugacuga

SEQ ID NO: 12137 - RNA, 38 nt, Artificial Sequence
  Description of Artificial Sequence:  Enzymatic Nucleic Acid
ucuggagacugaugaggccguuaggccgaaaaugacug

SEQ ID NO: 12138 - RNA, 38 nt, Artificial Sequence
  Description of Artificial Sequence:  Enzymatic Nucleic Acid
guucuggacugaugaggccguuaggccgaaauaaugac

SEQ ID NO: 12139 - RNA, 38 nt, Artificial Sequence
  Description of Artificial Sequence:  Enzymatic Nucleic Acid
cuguucugcugaugaggccguuaggccgaaagauaaug

SEQ ID NO: 12140 - RNA, 38 nt, Artificial Sequence
  Description of Artificial Sequence:  Enzymatic Nucleic Acid
caaugggacugaugaggccguuaggccgaaaucuucaa

SEQ ID NO: 12141 - RNA, 38 nt, Artificial Sequence
  Description of Artificial Sequence:  Enzymatic Nucleic Acid
uccaauggcugaugaggccguuaggccgaaauaucuuc

SEQ ID NO: 12142 - RNA, 38 nt, Artificial Sequence
  Description of Artificial Sequence:  Enzymatic Nucleic Acid
guuccucccugaugaggccguuaggccgaaaugggaua

SEQ ID NO: 12143 - RNA, 38 nt, Artificial Sequence
  Description of Artificial Sequence:  Enzymatic Nucleic Acid
aucacuuucugaugaggccguuaggccgaaacuucugg

SEQ ID NO: 12144 - RNA, 38 nt, Artificial Sequence
  Description of Artificial Sequence:  Enzymatic Nucleic Acid
ucaucuggcugaugaggccguuaggccgaaaucacuuu

SEQ ID NO: 12145 - RNA, 38 nt, Artificial Sequence
  Description of Artificial Sequence:  Enzymatic Nucleic Acid
gaugcaagcugaugaggccguuaggccgaaaccauccc

SEQ ID NO: 12146 - RNA, 38 nt, Artificial Sequence
  Description of Artificial Sequence:  Enzymatic Nucleic Acid
ucugaugccugaugaggccguuaggccgaaaggaccau

SEQ ID NO: 12147 - RNA, 38 nt, Artificial Sequence
  Description of Artificial Sequence:  Enzymatic Nucleic Acid
gcucuucucugaugaggccguuaggccgaaaugcaagg

SEQ ID NO: 12148 - RNA, 38 nt, Artificial Sequence
  Description of Artificial Sequence:  Enzymatic Nucleic Acid
auggagaucugaugaggccguuaggccgaaauuuguuc

SEQ ID NO: 12149 - RNA, 38 nt, Artificial Sequence
  Description of Artificial Sequence:  Enzymatic Nucleic Acid
gauggagacugaugaggccguuaggccgaaaauuuguu

SEQ ID NO: 12150 - RNA, 38 nt, Artificial Sequence
  Description of Artificial Sequence:  Enzymatic Nucleic Acid
ccugcuuucugaugaggccguuaggccgaaacugggca

SEQ ID NO: 12151 - RNA, 38 nt, Artificial Sequence
  Description of Artificial Sequence:  Enzymatic Nucleic Acid
aggccacacugaugaggccguuaggccgaaacucccug

SEQ ID NO: 12152 - RNA, 38 nt, Artificial Sequence
  Description of Artificial Sequence:  Enzymatic Nucleic Acid
agccuucccugaugaggccguuaggccgaaaggccaca

SEQ ID NO: 12153 - RNA, 38 nt, Artificial Sequence
  Description of Artificial Sequence:  Enzymatic Nucleic Acid
ucugguugcugaugaggccguuaggccgaaagccuucc

SEQ ID NO: 12154 - RNA, 38 nt, Artificial Sequence
  Description of Artificial Sequence:  Enzymatic Nucleic Acid
cagacuggcugaugaggccguuaggccgaaagccacug

SEQ ID NO: 12155 - RNA, 38 nt, Artificial Sequence
  Description of Artificial Sequence:  Enzymatic Nucleic Acid
gauacccacugaugaggccguuaggccgaaacugguag

SEQ ID NO: 12156 - RNA, 38 nt, Artificial Sequence
  Description of Artificial Sequence:  Enzymatic Nucleic Acid
cugagugacugaugaggccguuaggccgaaacccagac

SEQ ID NO: 12157 - RNA, 38 nt, Artificial Sequence
  Description of Artificial Sequence:  Enzymatic Nucleic Acid
aucugagucugaugaggccguuaggccgaaauacccag

SEQ ID NO: 12158 - RNA, 38 nt, Artificial Sequence
  Description of Artificial Sequence:  Enzymatic Nucleic Acid
ugucaucucugaugaggccguuaggccgaaagugauac

SEQ ID NO: 12159 - RNA, 38 nt, Artificial Sequence
  Description of Artificial Sequence:  Enzymatic Nucleic Acid
cgcuggagcugaugaggccguuaggccgaaacacggug

SEQ ID NO: 12160 - RNA, 38 nt, Artificial Sequence
  Description of Artificial Sequence:  Enzymatic Nucleic Acid
cgucgcugcugaugaggccguuaggccgaaaguacacg

SEQ ID NO: 12161 - RNA, 38 nt, Artificial Sequence
  Description of Artificial Sequence:  Enzymatic Nucleic Acid
aucuuuaacugaugaggccguuaggccgaaaguccugc

SEQ ID NO: 12162 - RNA, 38 nt, Artificial Sequence
  Description of Artificial Sequence:  Enzymatic Nucleic Acid
caucuuuacugaugaggccguuaggccgaaaaguccug

SEQ ID NO: 12163 - RNA, 38 nt, Artificial Sequence
  Description of Artificial Sequence:  Enzymatic Nucleic Acid
ccaucuuucugaugaggccguuaggccgaaaaaguccu

SEQ ID NO: 12164 - RNA, 38 nt, Artificial Sequence
  Description of Artificial Sequence:  Enzymatic Nucleic Acid
accaucuucugaugaggccguuaggccgaaaaaagucc

SEQ ID NO: 12165 - RNA, 38 nt, Artificial Sequence
  Description of Artificial Sequence:  Enzymatic Nucleic Acid
ucagcgugcugaugaggccguuaggccgaaacugcagc

SEQ ID NO: 12166 - RNA, 38 nt, Artificial Sequence
  Description of Artificial Sequence:  Enzymatic Nucleic Acid
gucagcgucugaugaggccguuaggccgaaaacugcag

SEQ ID NO: 12167 - RNA, 38 nt, Artificial Sequence
  Description of Artificial Sequence:  Enzymatic Nucleic Acid
uggucccucugaugaggccguuaggccgaaagucagcg

SEQ ID NO: 12168 - RNA, 38 nt, Artificial Sequence
  Description of Artificial Sequence:  Enzymatic Nucleic Acid
caggaggucugaugaggccguuaggccgaaagcugcag

SEQ ID NO: 12169 - RNA, 38 nt, Artificial Sequence
  Description of Artificial Sequence:  Enzymatic Nucleic Acid
uuaaacagcugaugaggccguuaggccgaaaggugagc

SEQ ID NO: 12170 - RNA, 38 nt, Artificial Sequence
  Description of Artificial Sequence:  Enzymatic Nucleic Acid
uccauuuacugaugaggccguuaggccgaaacaggagg

SEQ ID NO: 12171 - RNA, 38 nt, Artificial Sequence
  Description of Artificial Sequence:  Enzymatic Nucleic Acid
uuccauuucugaugaggccguuaggccgaaaacaggag

SEQ ID NO: 12172 - RNA, 38 nt, Artificial Sequence
  Description of Artificial Sequence:  Enzymatic Nucleic Acid
cuuccauucugaugaggccguuaggccgaaaaacagga

SEQ ID NO: 12173 - RNA, 38 nt, Artificial Sequence
  Description of Artificial Sequence:  Enzymatic Nucleic Acid
cgggacagcugaugaggccguuaggccgaaaccacuuc

SEQ ID NO: 12174 - RNA, 38 nt, Artificial Sequence
  Description of Artificial Sequence:  Enzymatic Nucleic Acid
ggagccggcugaugaggccguuaggccgaaacaggacc

SEQ ID NO: 12175 - RNA, 38 nt, Artificial Sequence
  Description of Artificial Sequence:  Enzymatic Nucleic Acid
ugggggcgcugaugaggccguuaggccgaaagccggga

SEQ ID NO: 12176 - RNA, 38 nt, Artificial Sequence
  Description of Artificial Sequence:  Enzymatic Nucleic Acid
auuuccagcugaugaggccguuaggccgaaaguugggg

SEQ ID NO: 12177 - RNA, 38 nt, Artificial Sequence
  Description of Artificial Sequence:  Enzymatic Nucleic Acid
ucucucgucugaugaggccguuaggccgaaauuuccag

SEQ ID NO: 12178 - RNA, 38 nt, Artificial Sequence
  Description of Artificial Sequence:  Enzymatic Nucleic Acid
gaaaaucucugaugaggccguuaggccgaaagcagcac

SEQ ID NO: 12179 - RNA, 38 nt, Artificial Sequence
  Description of Artificial Sequence:  Enzymatic Nucleic Acid
ugaaaauccugaugaggccguuaggccgaaaagcagca

SEQ ID NO: 12180 - RNA, 38 nt, Artificial Sequence
  Description of Artificial Sequence:  Enzymatic Nucleic Acid
cacuugaacugaugaggccguuaggccgaaaucuaagc

SEQ ID NO: 12181 - RNA, 38 nt, Artificial Sequence
  Description of Artificial Sequence:  Enzymatic Nucleic Acid
acacuugacugaugaggccguuaggccgaaaaucuaag

SEQ ID NO: 12182 - RNA, 38 nt, Artificial Sequence
  Description of Artificial Sequence:  Enzymatic Nucleic Acid
aacacuugcugaugaggccguuaggccgaaaaaucuaa

SEQ ID NO: 12183 - RNA, 38 nt, Artificial Sequence
  Description of Artificial Sequence:  Enzymatic Nucleic Acid
caacacuucugaugaggccguuaggccgaaaaaaucua

SEQ ID NO: 12184 - RNA, 38 nt, Artificial Sequence
  Description of Artificial Sequence:  Enzymatic Nucleic Acid
gaaagaaccugaugaggccguuaggccgaaacacuuga

SEQ ID NO: 12185 - RNA, 38 nt, Artificial Sequence
  Description of Artificial Sequence:  Enzymatic Nucleic Acid
gugguggacugaugaggccguuaggccgaaagaacaac

SEQ ID NO: 12186 - RNA, 38 nt, Artificial Sequence
  Description of Artificial Sequence:  Enzymatic Nucleic Acid
ggugguggcugaugaggccguuaggccgaaaagaacaa

SEQ ID NO: 12187 - RNA, 38 nt, Artificial Sequence
  Description of Artificial Sequence:  Enzymatic Nucleic Acid
ggguggugcugaugaggccguuaggccgaaaaagaaca

SEQ ID NO: 12188 - RNA, 38 nt, Artificial Sequence
  Description of Artificial Sequence:  Enzymatic Nucleic Acid
aauguggccugaugaggccguuaggccgaaacuuccgg

SEQ ID NO: 12189 - RNA, 38 nt, Artificial Sequence
  Description of Artificial Sequence:  Enzymatic Nucleic Acid
gaaaaucacugaugaggccguuaggccgaaauguggcu

SEQ ID NO: 12190 - RNA, 38 nt, Artificial Sequence
  Description of Artificial Sequence:  Enzymatic Nucleic Acid
ugaaaauccugaugaggccguuaggccgaaaauguggc

SEQ ID NO: 12191 - RNA, 38 nt, Artificial Sequence
  Description of Artificial Sequence:  Enzymatic Nucleic Acid
aaaaugaacugaugaggccguuaggccgaaaucaaaug

SEQ ID NO: 12192 - RNA, 38 nt, Artificial Sequence
  Description of Artificial Sequence:  Enzymatic Nucleic Acid
aaaaaugacugaugaggccguuaggccgaaaaucaaau

SEQ ID NO: 12193 - RNA, 38 nt, Artificial Sequence
  Description of Artificial Sequence:  Enzymatic Nucleic Acid
caaaaaugcugaugaggccguuaggccgaaaaaucaaa

SEQ ID NO: 12194 - RNA, 38 nt, Artificial Sequence
  Description of Artificial Sequence:  Enzymatic Nucleic Acid
ccaaaaaucugaugaggccguuaggccgaaaaaaucaa

SEQ ID NO: 12195 - RNA, 38 nt, Artificial Sequence
  Description of Artificial Sequence:  Enzymatic Nucleic Acid
ccuccaaacugaugaggccguuaggccgaaaugaaaau

SEQ ID NO: 12196 - RNA, 38 nt, Artificial Sequence
  Description of Artificial Sequence:  Enzymatic Nucleic Acid
uccuccaacugaugaggccguuaggccgaaaaugaaaa

SEQ ID NO: 12197 - RNA, 38 nt, Artificial Sequence
  Description of Artificial Sequence:  Enzymatic Nucleic Acid
cuccuccacugaugaggccguuaggccgaaaaaugaaa

SEQ ID NO: 12198 - RNA, 38 nt, Artificial Sequence
  Description of Artificial Sequence:  Enzymatic Nucleic Acid
ccuccucccugaugaggccguuaggccgaaaaaaugaa

SEQ ID NO: 12199 - RNA, 38 nt, Artificial Sequence
  Description of Artificial Sequence:  Enzymatic Nucleic Acid
ugcagucucugaugaggccguuaggccgaaaggucccu

SEQ ID NO: 12200 - RNA, 38 nt, Artificial Sequence
  Description of Artificial Sequence:  Enzymatic Nucleic Acid
cugaggaccugaugaggccguuaggccgaaagcuccuu

SEQ ID NO: 12201 - RNA, 38 nt, Artificial Sequence
  Description of Artificial Sequence:  Enzymatic Nucleic Acid
gcccugagcugaugaggccguuaggccgaaacaagcuc

SEQ ID NO: 12202 - RNA, 38 nt, Artificial Sequence
  Description of Artificial Sequence:  Enzymatic Nucleic Acid
aaugcccucugaugaggccguuaggccgaaaggacaag

SEQ ID NO: 12203 - RNA, 38 nt, Artificial Sequence
  Description of Artificial Sequence:  Enzymatic Nucleic Acid
ucucuggacugaugaggccguuaggccgaaaugcccug

SEQ ID NO: 12204 - RNA, 38 nt, Artificial Sequence
  Description of Artificial Sequence:  Enzymatic Nucleic Acid
uucucuggcugaugaggccguuaggccgaaaaugcccu

SEQ ID NO: 12205 - RNA, 38 nt, Artificial Sequence
  Description of Artificial Sequence:  Enzymatic Nucleic Acid
cuucucugcugaugaggccguuaggccgaaaaaugccc

SEQ ID NO: 12206 - RNA, 38 nt, Artificial Sequence
  Description of Artificial Sequence:  Enzymatic Nucleic Acid
guagaguccugaugaggccguuaggccgaaacacauuc

SEQ ID NO: 12207 - RNA, 38 nt, Artificial Sequence
  Description of Artificial Sequence:  Enzymatic Nucleic Acid
agagaguacugaugaggccguuaggccgaaagucaaca

SEQ ID NO: 12208 - RNA, 38 nt, Artificial Sequence
  Description of Artificial Sequence:  Enzymatic Nucleic Acid
aaagagagcugaugaggccguuaggccgaaagagucaa

SEQ ID NO: 12209 - RNA, 38 nt, Artificial Sequence
  Description of Artificial Sequence:  Enzymatic Nucleic Acid
ggaaaagacugaugaggccguuaggccgaaaguagagu

SEQ ID NO: 12210 - RNA, 38 nt, Artificial Sequence
  Description of Artificial Sequence:  Enzymatic Nucleic Acid
auggaaaacugaugaggccguuaggccgaaagaguaga

SEQ ID NO: 12211 - RNA, 38 nt, Artificial Sequence
  Description of Artificial Sequence:  Enzymatic Nucleic Acid
gaauggaacugaugaggccguuaggccgaaagagagua

SEQ ID NO: 12212 - RNA, 38 nt, Artificial Sequence
  Description of Artificial Sequence:  Enzymatic Nucleic Acid
ugaauggacugaugaggccguuaggccgaaaagagagu

SEQ ID NO: 12213 - RNA, 38 nt, Artificial Sequence
  Description of Artificial Sequence:  Enzymatic Nucleic Acid
augaauggcugaugaggccguuaggccgaaaaagagag

SEQ ID NO: 12214 - RNA, 38 nt, Artificial Sequence
  Description of Artificial Sequence:  Enzymatic Nucleic Acid
aaugaaugcugaugaggccguuaggccgaaaaaagaga

SEQ ID NO: 12215 - RNA, 38 nt, Artificial Sequence
  Description of Artificial Sequence:  Enzymatic Nucleic Acid
uuuaaaugcugaugaggccguuaggccgaaauggaaaa

SEQ ID NO: 12216 - RNA, 38 nt, Artificial Sequence
  Description of Artificial Sequence:  Enzymatic Nucleic Acid
uuuuaaaucugaugaggccguuaggccgaaaauggaaa

SEQ ID NO: 12217 - RNA, 38 nt, Artificial Sequence
  Description of Artificial Sequence:  Enzymatic Nucleic Acid
gacuuuuacugaugaggccguuaggccgaaaugaaugg

SEQ ID NO: 12218 - RNA, 38 nt, Artificial Sequence
  Description of Artificial Sequence:  Enzymatic Nucleic Acid
ggacuuuucugaugaggccguuaggccgaaaaugaaug

SEQ ID NO: 12219 - RNA, 38 nt, Artificial Sequence
  Description of Artificial Sequence:  Enzymatic Nucleic Acid
aggacuuucugaugaggccguuaggccgaaaaaugaau

SEQ ID NO: 12220 - RNA, 38 nt, Artificial Sequence
  Description of Artificial Sequence:  Enzymatic Nucleic Acid
uuauauagcugaugaggccguuaggccgaaacuuuuaa

SEQ ID NO: 12221 - RNA, 38 nt, Artificial Sequence
  Description of Artificial Sequence:  Enzymatic Nucleic Acid
acauuauacugaugaggccguuaggccgaaaggacuuu

SEQ ID NO: 12222 - RNA, 38 nt, Artificial Sequence
  Description of Artificial Sequence:  Enzymatic Nucleic Acid
gcacauuacugaugaggccguuaggccgaaauaggacu

SEQ ID NO: 12223 - RNA, 38 nt, Artificial Sequence
  Description of Artificial Sequence:  Enzymatic Nucleic Acid
gggcacaucugaugaggccguuaggccgaaauauagga

SEQ ID NO: 12224 - RNA, 38 nt, Artificial Sequence
  Description of Artificial Sequence:  Enzymatic Nucleic Acid
gguagugacugaugaggccguuaggccgaaaccacagc

SEQ ID NO: 12225 - RNA, 38 nt, Artificial Sequence
  Description of Artificial Sequence:  Enzymatic Nucleic Acid
cugguagucugaugaggccguuaggccgaaagaccaca

SEQ ID NO: 12226 - RNA, 38 nt, Artificial Sequence
  Description of Artificial Sequence:  Enzymatic Nucleic Acid
uuaacuggcugaugaggccguuaggccgaaagugagac

SEQ ID NO: 12227 - RNA, 38 nt, Artificial Sequence
  Description of Artificial Sequence:  Enzymatic Nucleic Acid
uuugcuuucugaugaggccguuaggccgaaacugguag

SEQ ID NO: 12228 - RNA, 38 nt, Artificial Sequence
  Description of Artificial Sequence:  Enzymatic Nucleic Acid
uuuugcuucugaugaggccguuaggccgaaaacuggua

SEQ ID NO: 12229 - RNA, 38 nt, Artificial Sequence
  Description of Artificial Sequence:  Enzymatic Nucleic Acid
guguuugacugaugaggccguuaggccgaaagucuuuu

SEQ ID NO: 12230 - RNA, 38 nt, Artificial Sequence
  Description of Artificial Sequence:  Enzymatic Nucleic Acid
cguguuugcugaugaggccguuaggccgaaaagucuuu

SEQ ID NO: 12231 - RNA, 38 nt, Artificial Sequence
  Description of Artificial Sequence:  Enzymatic Nucleic Acid
acguguuucugaugaggccguuaggccgaaaaagucuu

SEQ ID NO: 12232 - RNA, 38 nt, Artificial Sequence
  Description of Artificial Sequence:  Enzymatic Nucleic Acid
ggaggacacugaugaggccguuaggccgaaaguccacg

SEQ ID NO: 12233 - RNA, 38 nt, Artificial Sequence
  Description of Artificial Sequence:  Enzymatic Nucleic Acid
ucuuggagcugaugaggccguuaggccgaaacagaguc

SEQ ID NO: 12234 - RNA, 38 nt, Artificial Sequence
  Description of Artificial Sequence:  Enzymatic Nucleic Acid
acuucuugcugaugaggccguuaggccgaaaggacaga

SEQ ID NO: 12235 - RNA, 38 nt, Artificial Sequence
  Description of Artificial Sequence:  Enzymatic Nucleic Acid
guuucacacugaugaggccguuaggccgaaaggugccg

SEQ ID NO: 12236 - RNA, 38 nt, Artificial Sequence
  Description of Artificial Sequence:  Enzymatic Nucleic Acid
gcccauuccugaugaggccguuaggccgaaauccaguu

SEQ ID NO: 12237 - RNA, 38 nt, Artificial Sequence
  Description of Artificial Sequence:  Enzymatic Nucleic Acid
aacacacacugaugaggccguuaggccgaaagcauugc

SEQ ID NO: 12238 - RNA, 38 nt, Artificial Sequence
  Description of Artificial Sequence:  Enzymatic Nucleic Acid
caacacaccugaugaggccguuaggccgaaaagcauug

SEQ ID NO: 12239 - RNA, 38 nt, Artificial Sequence
  Description of Artificial Sequence:  Enzymatic Nucleic Acid
ccauccuccugaugaggccguuaggccgaaacacacaa

SEQ ID NO: 12240 - RNA, 38 nt, Artificial Sequence
  Description of Artificial Sequence:  Enzymatic Nucleic Acid
ggcccuggcugaugaggccguuaggccgaaacaucuca

SEQ ID NO: 12241 - RNA, 38 nt, Artificial Sequence
  Description of Artificial Sequence:  Enzymatic Nucleic Acid
gguagacacugaugaggccguuaggccgaaacucggcc

SEQ ID NO: 12242 - RNA, 38 nt, Artificial Sequence
  Description of Artificial Sequence:  Enzymatic Nucleic Acid
ccaagguacugaugaggccguuaggccgaaacagacuc

SEQ ID NO: 12243 - RNA, 38 nt, Artificial Sequence
  Description of Artificial Sequence:  Enzymatic Nucleic Acid
cuccaaggcugaugaggccguuaggccgaaagacagac

SEQ ID NO: 12244 - RNA, 38 nt, Artificial Sequence
  Description of Artificial Sequence:  Enzymatic Nucleic Acid
aagccucccugaugaggccguuaggccgaaagguagac

SEQ ID NO: 12245 - RNA, 38 nt, Artificial Sequence
  Description of Artificial Sequence:  Enzymatic Nucleic Acid
ccuccacacugaugaggccguuaggccgaaagccucca

SEQ ID NO: 12246 - RNA, 38 nt, Artificial Sequence
  Description of Artificial Sequence:  Enzymatic Nucleic Acid
uccuccaccugaugaggccguuaggccgaaaagccucc

SEQ ID NO: 12247 - RNA, 38 nt, Artificial Sequence
  Description of Artificial Sequence:  Enzymatic Nucleic Acid
uuggcucacugaugaggccguuaggccgaaagcccgca

SEQ ID NO: 12248 - RNA, 38 nt, Artificial Sequence
  Description of Artificial Sequence:  Enzymatic Nucleic Acid
ccacacuucugaugaggccguuaggccgaaacacuugg

SEQ ID NO: 12249 - RNA, 38 nt, Artificial Sequence
  Description of Artificial Sequence:  Enzymatic Nucleic Acid
cccacacucugaugaggccguuaggccgaaaacacuug

SEQ ID NO: 12250 - RNA, 38 nt, Artificial Sequence
  Description of Artificial Sequence:  Enzymatic Nucleic Acid
cuccgagccugaugaggccguuaggccgaaacuugcgc

SEQ ID NO: 12251 - RNA, 38 nt, Artificial Sequence
  Description of Artificial Sequence:  Enzymatic Nucleic Acid
cgcucucccugaugaggccguuaggccgaaagcgacuu

SEQ ID NO: 12252 - RNA, 38 nt, Artificial Sequence
  Description of Artificial Sequence:  Enzymatic Nucleic Acid
caggcucccugaugaggccguuaggccgaaaccgcucu

SEQ ID NO: 12253 - RNA, 38 nt, Artificial Sequence
  Description of Artificial Sequence:  Enzymatic Nucleic Acid
gccagcaccugaugaggccguuaggccgaaaugcaucu

SEQ ID NO: 12254 - RNA, 38 nt, Artificial Sequence
  Description of Artificial Sequence:  Enzymatic Nucleic Acid
cuccaccacugaugaggccguuaggccgaaagccagca

SEQ ID NO: 12255 - RNA, 38 nt, Artificial Sequence
  Description of Artificial Sequence:  Enzymatic Nucleic Acid
caggccaccugaugaggccguuaggccgaaagcccacc

SEQ ID NO: 12256 - RNA, 38 nt, Artificial Sequence
  Description of Artificial Sequence:  Enzymatic Nucleic Acid
cguuuccucugaugaggccguuaggccgaaacaggcca

SEQ ID NO: 12257 - RNA, 38 nt, Artificial Sequence
  Description of Artificial Sequence:  Enzymatic Nucleic Acid
caaaaccacugaugaggccguuaggccgaaacccugcc

SEQ ID NO: 12258 - RNA, 38 nt, Artificial Sequence
  Description of Artificial Sequence:  Enzymatic Nucleic Acid
ccaaaacccugaugaggccguuaggccgaaaacccugc

SEQ ID NO: 12259 - RNA, 38 nt, Artificial Sequence
  Description of Artificial Sequence:  Enzymatic Nucleic Acid
ccuuccaacugaugaggccguuaggccgaaaccaaacc

SEQ ID NO: 12260 - RNA, 38 nt, Artificial Sequence
  Description of Artificial Sequence:  Enzymatic Nucleic Acid
accuuccacugaugaggccguuaggccgaaaaccaaac

SEQ ID NO: 12261 - RNA, 38 nt, Artificial Sequence
  Description of Artificial Sequence:  Enzymatic Nucleic Acid
aaccuucccugaugaggccguuaggccgaaaaaccaaa

SEQ ID NO: 12262 - RNA, 38 nt, Artificial Sequence
  Description of Artificial Sequence:  Enzymatic Nucleic Acid
agcacgcacugaugaggccguuaggccgaaaccuucca

SEQ ID NO: 12263 - RNA, 38 nt, Artificial Sequence
  Description of Artificial Sequence:  Enzymatic Nucleic Acid
gagcacgccugaugaggccguuaggccgaaaaccuucc

SEQ ID NO: 12264 - RNA, 38 nt, Artificial Sequence
  Description of Artificial Sequence:  Enzymatic Nucleic Acid
acugugaacugaugaggccguuaggccgaaagcacgca

SEQ ID NO: 12265 - RNA, 38 nt, Artificial Sequence
  Description of Artificial Sequence:  Enzymatic Nucleic Acid
cgacugugcugaugaggccguuaggccgaaagagcacg

SEQ ID NO: 12266 - RNA, 38 nt, Artificial Sequence
  Description of Artificial Sequence:  Enzymatic Nucleic Acid
ccgacugucugaugaggccguuaggccgaaaagagcac

SEQ ID NO: 12267 - RNA, 38 nt, Artificial Sequence
  Description of Artificial Sequence:  Enzymatic Nucleic Acid
uguaaccccugaugaggccguuaggccgaaacugugaa

SEQ ID NO: 12268 - RNA, 38 nt, Artificial Sequence
  Description of Artificial Sequence:  Enzymatic Nucleic Acid
ucgccugucugaugaggccguuaggccgaaacccgacu

SEQ ID NO: 12269 - RNA, 38 nt, Artificial Sequence
  Description of Artificial Sequence:  Enzymatic Nucleic Acid
cucgccugcugaugaggccguuaggccgaaaacccgac

SEQ ID NO: 12270 - RNA, 38 nt, Artificial Sequence
  Description of Artificial Sequence:  Enzymatic Nucleic Acid
ccacagggcugaugaggccguuaggccgaaacucgccu

SEQ ID NO: 12271 - RNA, 38 nt, Artificial Sequence
  Description of Artificial Sequence:  Enzymatic Nucleic Acid
gccacaggcugaugaggccguuaggccgaaaacucgcc

SEQ ID NO: 12272 - RNA, 38 nt, Artificial Sequence
  Description of Artificial Sequence:  Enzymatic Nucleic Acid
gaguaggacugaugaggccguuaggccgaaacgccaca

SEQ ID NO: 12273 - RNA, 38 nt, Artificial Sequence
  Description of Artificial Sequence:  Enzymatic Nucleic Acid
ggaguaggcugaugaggccguuaggccgaaaacgccac

SEQ ID NO: 12274 - RNA, 38 nt, Artificial Sequence
  Description of Artificial Sequence:  Enzymatic Nucleic Acid
aggaguagcugaugaggccguuaggccgaaaaacgcca

SEQ ID NO: 12275 - RNA, 38 nt, Artificial Sequence
  Description of Artificial Sequence:  Enzymatic Nucleic Acid
auuaggagcugaugaggccguuaggccgaaaggaaacg

SEQ ID NO: 12276 - RNA, 38 nt, Artificial Sequence
  Description of Artificial Sequence:  Enzymatic Nucleic Acid
cucauuagcugaugaggccguuaggccgaaaguaggaa

SEQ ID NO: 12277 - RNA, 38 nt, Artificial Sequence
  Description of Artificial Sequence:  Enzymatic Nucleic Acid
acucucaucugaugaggccguuaggccgaaaggaguag

SEQ ID NO: 12278 - RNA, 38 nt, Artificial Sequence
  Description of Artificial Sequence:  Enzymatic Nucleic Acid
ccggaaggcugaugaggccguuaggccgaaacucucau

SEQ ID NO: 12279 - RNA, 38 nt, Artificial Sequence
  Description of Artificial Sequence:  Enzymatic Nucleic Acid
uccggaagcugaugaggccguuaggccgaaaacucuca

SEQ ID NO: 12280 - RNA, 38 nt, Artificial Sequence
  Description of Artificial Sequence:  Enzymatic Nucleic Acid
gaguccggcugaugaggccguuaggccgaaaggaacuc

SEQ ID NO: 12281 - RNA, 38 nt, Artificial Sequence
  Description of Artificial Sequence:  Enzymatic Nucleic Acid
agaguccgcugaugaggccguuaggccgaaaaggaacu

SEQ ID NO: 12282 - RNA, 38 nt, Artificial Sequence
  Description of Artificial Sequence:  Enzymatic Nucleic Acid
acacguaacugaugaggccguuaggccgaaaguccgga

SEQ ID NO: 12283 - RNA, 38 nt, Artificial Sequence
  Description of Artificial Sequence:  Enzymatic Nucleic Acid
agacacgucugaugaggccguuaggccgaaagaguccg

SEQ ID NO: 12284 - RNA, 38 nt, Artificial Sequence
  Description of Artificial Sequence:  Enzymatic Nucleic Acid
gagacacgcugaugaggccguuaggccgaaaagagucc

SEQ ID NO: 12285 - RNA, 38 nt, Artificial Sequence
  Description of Artificial Sequence:  Enzymatic Nucleic Acid
ggccaggacugaugaggccguuaggccgaaacacguaa

SEQ ID NO: 12286 - RNA, 38 nt, Artificial Sequence
  Description of Artificial Sequence:  Enzymatic Nucleic Acid
caggccagcugaugaggccguuaggccgaaagacacgu

SEQ ID NO: 12287 - RNA, 38 nt, Artificial Sequence
  Description of Artificial Sequence:  Enzymatic Nucleic Acid
gaaggagccugaugaggccguuaggccgaaagcugcau

SEQ ID NO: 12288 - RNA, 38 nt, Artificial Sequence
  Description of Artificial Sequence:  Enzymatic Nucleic Acid
ugaggaagcugaugaggccguuaggccgaaagcaagcu

SEQ ID NO: 12289 - RNA, 38 nt, Artificial Sequence
  Description of Artificial Sequence:  Enzymatic Nucleic Acid
agaugaggcugaugaggccguuaggccgaaaggagcaa

SEQ ID NO: 12290 - RNA, 38 nt, Artificial Sequence
  Description of Artificial Sequence:  Enzymatic Nucleic Acid
gagaugagcugaugaggccguuaggccgaaaaggagca

SEQ ID NO: 12291 - RNA, 38 nt, Artificial Sequence
  Description of Artificial Sequence:  Enzymatic Nucleic Acid
ugagagaucugaugaggccguuaggccgaaaggaagga

SEQ ID NO: 12292 - RNA, 38 nt, Artificial Sequence
  Description of Artificial Sequence:  Enzymatic Nucleic Acid
gccugagacugaugaggccguuaggccgaaaugaggaa

SEQ ID NO: 12293 - RNA, 38 nt, Artificial Sequence
  Description of Artificial Sequence:  Enzymatic Nucleic Acid
cagccugacugaugaggccguuaggccgaaagaugagg

SEQ ID NO: 12294 - RNA, 38 nt, Artificial Sequence
  Description of Artificial Sequence:  Enzymatic Nucleic Acid
cacagccucugaugaggccguuaggccgaaagagauga

SEQ ID NO: 12295 - RNA, 38 nt, Artificial Sequence
  Description of Artificial Sequence:  Enzymatic Nucleic Acid
ucugaauucugaugaggccguuaggccgaaaggcacag

SEQ ID NO: 12296 - RNA, 38 nt, Artificial Sequence
  Description of Artificial Sequence:  Enzymatic Nucleic Acid
uucugaaucugaugaggccguuaggccgaaaaggcaca

SEQ ID NO: 12297 - RNA, 38 nt, Artificial Sequence
  Description of Artificial Sequence:  Enzymatic Nucleic Acid
guguucugcugaugaggccguuaggccgaaauuaaggc

SEQ ID NO: 12298 - RNA, 38 nt, Artificial Sequence
  Description of Artificial Sequence:  Enzymatic Nucleic Acid
gguguucucugaugaggccguuaggccgaaaauuaagg

SEQ ID NO: 12299 - RNA, 38 nt, Artificial Sequence
  Description of Artificial Sequence:  Enzymatic Nucleic Acid
ccucugcccugaugaggccguuaggccgaaacguuccu

SEQ ID NO: 12300 - RNA, 38 nt, Artificial Sequence
  Description of Artificial Sequence:  Enzymatic Nucleic Acid
cccgucagcugaugaggccguuaggccgaaagccucug

SEQ ID NO: 12301 - RNA, 38 nt, Artificial Sequence
  Description of Artificial Sequence:  Enzymatic Nucleic Acid
guucucaccugaugaggccguuaggccgaaauucuucg

SEQ ID NO: 12302 - RNA, 38 nt, Artificial Sequence
  Description of Artificial Sequence:  Enzymatic Nucleic Acid
gaaacccucugaugaggccguuaggccgaaaguuucug

SEQ ID NO: 12303 - RNA, 38 nt, Artificial Sequence
  Description of Artificial Sequence:  Enzymatic Nucleic Acid
ccagcagacugaugaggccguuaggccgaaacccugag

SEQ ID NO: 12304 - RNA, 38 nt, Artificial Sequence
  Description of Artificial Sequence:  Enzymatic Nucleic Acid
cccagcagcugaugaggccguuaggccgaaaacccuga

SEQ ID NO: 12305 - RNA, 38 nt, Artificial Sequence
  Description of Artificial Sequence:  Enzymatic Nucleic Acid
acccagcacugaugaggccguuaggccgaaaaacccug

SEQ ID NO: 12306 - RNA, 38 nt, Artificial Sequence
  Description of Artificial Sequence:  Enzymatic Nucleic Acid
aacccucacugaugaggccguuaggccgaaaccugcca

SEQ ID NO: 12307 - RNA, 38 nt, Artificial Sequence
  Description of Artificial Sequence:  Enzymatic Nucleic Acid
ugacagagcugaugaggccguuaggccgaaacccucag

SEQ ID NO: 12308 - RNA, 38 nt, Artificial Sequence
  Description of Artificial Sequence:  Enzymatic Nucleic Acid
uugacagacugaugaggccguuaggccgaaaacccuca

SEQ ID NO: 12309 - RNA, 38 nt, Artificial Sequence
  Description of Artificial Sequence:  Enzymatic Nucleic Acid
acuugacacugaugaggccguuaggccgaaagaacccu

SEQ ID NO: 12310 - RNA, 38 nt, Artificial Sequence
  Description of Artificial Sequence:  Enzymatic Nucleic Acid
cgccacuucugaugaggccguuaggccgaaacagagaa

SEQ ID NO: 12311 - RNA, 38 nt, Artificial Sequence
  Description of Artificial Sequence:  Enzymatic Nucleic Acid
ugagccuucugaugaggccguuaggccgaaaccgccac

SEQ ID NO: 12312 - RNA, 38 nt, Artificial Sequence
  Description of Artificial Sequence:  Enzymatic Nucleic Acid
accagccucugaugaggccguuaggccgaaagccuuua

SEQ ID NO: 12313 - RNA, 38 nt, Artificial Sequence
  Description of Artificial Sequence:  Enzymatic Nucleic Acid
agaggaagcugaugaggccguuaggccgaaacaccagc

SEQ ID NO: 12314 - RNA, 38 nt, Artificial Sequence
  Description of Artificial Sequence:  Enzymatic Nucleic Acid
uagaggaacugaugaggccguuaggccgaaaacaccag

SEQ ID NO: 12315 - RNA, 38 nt, Artificial Sequence
  Description of Artificial Sequence:  Enzymatic Nucleic Acid
gauagaggcugaugaggccguuaggccgaaagaacacc

SEQ ID NO: 12316 - RNA, 38 nt, Artificial Sequence
  Description of Artificial Sequence:  Enzymatic Nucleic Acid
agauagagcugaugaggccguuaggccgaaaagaacac

SEQ ID NO: 12317 - RNA, 38 nt, Artificial Sequence
  Description of Artificial Sequence:  Enzymatic Nucleic Acid
uggagauacugaugaggccguuaggccgaaaggaagaa

SEQ ID NO: 12318 - RNA, 38 nt, Artificial Sequence
  Description of Artificial Sequence:  Enzymatic Nucleic Acid
aguggagacugaugaggccguuaggccgaaagaggaag

SEQ ID NO: 12319 - RNA, 38 nt, Artificial Sequence
  Description of Artificial Sequence:  Enzymatic Nucleic Acid
ggaguggacugaugaggccguuaggccgaaauagagga

SEQ ID NO: 12320 - RNA, 38 nt, Artificial Sequence
  Description of Artificial Sequence:  Enzymatic Nucleic Acid
caggagugcugaugaggccguuaggccgaaagauagag

SEQ ID NO: 12321 - RNA, 38 nt, Artificial Sequence
  Description of Artificial Sequence:  Enzymatic Nucleic Acid
ccugacagcugaugaggccguuaggccgaaaguggaga

SEQ ID NO: 12322 - RNA, 38 nt, Artificial Sequence
  Description of Artificial Sequence:  Enzymatic Nucleic Acid
gggggccucugaugaggccguuaggccgaaacaggagu

SEQ ID NO: 12323 - RNA, 38 nt, Artificial Sequence
  Description of Artificial Sequence:  Enzymatic Nucleic Acid
auacugagcugaugaggccguuaggccgaaacuugggg

SEQ ID NO: 12324 - RNA, 38 nt, Artificial Sequence
  Description of Artificial Sequence:  Enzymatic Nucleic Acid
aaaauacucugaugaggccguuaggccgaaaggacuug

SEQ ID NO: 12325 - RNA, 38 nt, Artificial Sequence
  Description of Artificial Sequence:  Enzymatic Nucleic Acid
agcuaaaacugaugaggccguuaggccgaaacugagga

SEQ ID NO: 12326 - RNA, 38 nt, Artificial Sequence
  Description of Artificial Sequence:  Enzymatic Nucleic Acid
aaagcuaacugaugaggccguuaggccgaaauacugag

SEQ ID NO: 12327 - RNA, 38 nt, Artificial Sequence
  Description of Artificial Sequence:  Enzymatic Nucleic Acid
caaagcuacugaugaggccguuaggccgaaaauacuga

SEQ ID NO: 12328 - RNA, 38 nt, Artificial Sequence
  Description of Artificial Sequence:  Enzymatic Nucleic Acid
acaaagcucugaugaggccguuaggccgaaaaauacug

SEQ ID NO: 12329 - RNA, 38 nt, Artificial Sequence
  Description of Artificial Sequence:  Enzymatic Nucleic Acid
cacaaagccugaugaggccguuaggccgaaaaaauacu

SEQ ID NO: 12330 - RNA, 38 nt, Artificial Sequence
  Description of Artificial Sequence:  Enzymatic Nucleic Acid
aagccacacugaugaggccguuaggccgaaagcuaaaa

SEQ ID NO: 12331 - RNA, 38 nt, Artificial Sequence
  Description of Artificial Sequence:  Enzymatic Nucleic Acid
gaagccaccugaugaggccguuaggccgaaaagcuaaa

SEQ ID NO: 12332 - RNA, 38 nt, Artificial Sequence
  Description of Artificial Sequence:  Enzymatic Nucleic Acid
ccaucaggcugaugaggccguuaggccgaaagccacaa

SEQ ID NO: 12333 - RNA, 38 nt, Artificial Sequence
  Description of Artificial Sequence:  Enzymatic Nucleic Acid
gccaucagcugaugaggccguuaggccgaaaagccaca

SEQ ID NO: 12334 - RNA, 38 nt, Artificial Sequence
  Description of Artificial Sequence:  Enzymatic Nucleic Acid
ccaauuaacugaugaggccguuaggccgaaauuuuucu

SEQ ID NO: 12335 - RNA, 38 nt, Artificial Sequence
  Description of Artificial Sequence:  Enzymatic Nucleic Acid
aaccaauucugaugaggccguuaggccgaaagauuuuu

SEQ ID NO: 12336 - RNA, 38 nt, Artificial Sequence
  Description of Artificial Sequence:  Enzymatic Nucleic Acid
caaccaaucugaugaggccguuaggccgaaaagauuuu

SEQ ID NO: 12337 - RNA, 38 nt, Artificial Sequence
  Description of Artificial Sequence:  Enzymatic Nucleic Acid
aaccaacccugaugaggccguuaggccgaaauuaagau

SEQ ID NO: 12338 - RNA, 38 nt, Artificial Sequence
  Description of Artificial Sequence:  Enzymatic Nucleic Acid
agcaaacccugaugaggccguuaggccgaaaccaauua

SEQ ID NO: 12339 - RNA, 38 nt, Artificial Sequence
  Description of Artificial Sequence:  Enzymatic Nucleic Acid
ggagagcacugaugaggccguuaggccgaaaccaacca

SEQ ID NO: 12340 - RNA, 38 nt, Artificial Sequence
  Description of Artificial Sequence:  Enzymatic Nucleic Acid
uggagagccugaugaggccguuaggccgaaaaccaacc

SEQ ID NO: 12341 - RNA, 38 nt, Artificial Sequence
  Description of Artificial Sequence:  Enzymatic Nucleic Acid
uaucuggacugaugaggccguuaggccgaaagcaaacc

SEQ ID NO: 12342 - RNA, 38 nt, Artificial Sequence
  Description of Artificial Sequence:  Enzymatic Nucleic Acid
auuaucugcugaugaggccguuaggccgaaagagcaaa

SEQ ID NO: 12343 - RNA, 38 nt, Artificial Sequence
  Description of Artificial Sequence:  Enzymatic Nucleic Acid
cuagugaucugaugaggccguuaggccgaaaucuggag

SEQ ID NO: 12344 - RNA, 38 nt, Artificial Sequence
  Description of Artificial Sequence:  Enzymatic Nucleic Acid
uggcuagucugaugaggccguuaggccgaaauuaucug

SEQ ID NO: 12345 - RNA, 38 nt, Artificial Sequence
  Description of Artificial Sequence:  Enzymatic Nucleic Acid
aaucuggccugaugaggccguuaggccgaaagugauua

SEQ ID NO: 12346 - RNA, 38 nt, Artificial Sequence
  Description of Artificial Sequence:  Enzymatic Nucleic Acid
aauuucgacugaugaggccguuaggccgaaaucuggcu

SEQ ID NO: 12347 - RNA, 38 nt, Artificial Sequence
  Description of Artificial Sequence:  Enzymatic Nucleic Acid
uaauuucgcugaugaggccguuaggccgaaaaucuggc

SEQ ID NO: 12348 - RNA, 38 nt, Artificial Sequence
  Description of Artificial Sequence:  Enzymatic Nucleic Acid
guaauuuccugaugaggccguuaggccgaaaaaucugg

SEQ ID NO: 12349 - RNA, 38 nt, Artificial Sequence
  Description of Artificial Sequence:  Enzymatic Nucleic Acid
uaaaaagucugaugaggccguuaggccgaaauuucgaa

SEQ ID NO: 12350 - RNA, 38 nt, Artificial Sequence
  Description of Artificial Sequence:  Enzymatic Nucleic Acid
cuaaaaagcugaugaggccguuaggccgaaaauuucga

SEQ ID NO: 12351 - RNA, 38 nt, Artificial Sequence
  Description of Artificial Sequence:  Enzymatic Nucleic Acid
cggcuaaacugaugaggccguuaggccgaaaguaauuu

SEQ ID NO: 12352 - RNA, 38 nt, Artificial Sequence
  Description of Artificial Sequence:  Enzymatic Nucleic Acid
ucggcuaacugaugaggccguuaggccgaaaaguaauu

SEQ ID NO: 12353 - RNA, 38 nt, Artificial Sequence
  Description of Artificial Sequence:  Enzymatic Nucleic Acid
cucggcuacugaugaggccguuaggccgaaaaaguaau

SEQ ID NO: 12354 - RNA, 38 nt, Artificial Sequence
  Description of Artificial Sequence:  Enzymatic Nucleic Acid
ccucggcucugaugaggccguuaggccgaaaaaaguaa

SEQ ID NO: 12355 - RNA, 38 nt, Artificial Sequence
  Description of Artificial Sequence:  Enzymatic Nucleic Acid
accucggccugaugaggccguuaggccgaaaaaaagua

SEQ ID NO: 12356 - RNA, 38 nt, Artificial Sequence
  Description of Artificial Sequence:  Enzymatic Nucleic Acid
guuaucaucugaugaggccguuaggccgaaaccucggc

SEQ ID NO: 12357 - RNA, 38 nt, Artificial Sequence
  Description of Artificial Sequence:  Enzymatic Nucleic Acid
uguuaucacugaugaggccguuaggccgaaaaccucgg

SEQ ID NO: 12358 - RNA, 38 nt, Artificial Sequence
  Description of Artificial Sequence:  Enzymatic Nucleic Acid
guagaugucugaugaggccguuaggccgaaaucauaac

SEQ ID NO: 12359 - RNA, 38 nt, Artificial Sequence
  Description of Artificial Sequence:  Enzymatic Nucleic Acid
auacaguacugaugaggccguuaggccgaaauguuauc

SEQ ID NO: 12360 - RNA, 38 nt, Artificial Sequence
  Description of Artificial Sequence:  Enzymatic Nucleic Acid
ggauacagcugaugaggccguuaggccgaaagauguua

SEQ ID NO: 12361 - RNA, 38 nt, Artificial Sequence
  Description of Artificial Sequence:  Enzymatic Nucleic Acid
cuaaaggacugaugaggccguuaggccgaaacaguaga

SEQ ID NO: 12362 - RNA, 38 nt, Artificial Sequence
  Description of Artificial Sequence:  Enzymatic Nucleic Acid
uucuaaagcugaugaggccguuaggccgaaauacagua

SEQ ID NO: 12363 - RNA, 38 nt, Artificial Sequence
  Description of Artificial Sequence:  Enzymatic Nucleic Acid
aaauucuacugaugaggccguuaggccgaaaggauaca

SEQ ID NO: 12364 - RNA, 38 nt, Artificial Sequence
  Description of Artificial Sequence:  Enzymatic Nucleic Acid
aaaauucucugaugaggccguuaggccgaaaaggauac

SEQ ID NO: 12365 - RNA, 38 nt, Artificial Sequence
  Description of Artificial Sequence:  Enzymatic Nucleic Acid
uaaaauuccugaugaggccguuaggccgaaaaaggaua

SEQ ID NO: 12366 - RNA, 38 nt, Artificial Sequence
  Description of Artificial Sequence:  Enzymatic Nucleic Acid
uagguuaacugaugaggccguuaggccgaaauucuaaa

SEQ ID NO: 12367 - RNA, 38 nt, Artificial Sequence
  Description of Artificial Sequence:  Enzymatic Nucleic Acid
auagguuacugaugaggccguuaggccgaaaauucuaa

SEQ ID NO: 12368 - RNA, 38 nt, Artificial Sequence
  Description of Artificial Sequence:  Enzymatic Nucleic Acid
uauagguucugaugaggccguuaggccgaaaaauucua

SEQ ID NO: 12369 - RNA, 38 nt, Artificial Sequence
  Description of Artificial Sequence:  Enzymatic Nucleic Acid
uuauaggucugaugaggccguuaggccgaaaaaauucu

SEQ ID NO: 12370 - RNA, 38 nt, Artificial Sequence
  Description of Artificial Sequence:  Enzymatic Nucleic Acid
uaguuuuacugaugaggccguuaggccgaaagguuaaa

SEQ ID NO: 12371 - RNA, 38 nt, Artificial Sequence
  Description of Artificial Sequence:  Enzymatic Nucleic Acid
cauaguuucugaugaggccguuaggccgaaauagguua

SEQ ID NO: 12372 - RNA, 38 nt, Artificial Sequence
  Description of Artificial Sequence:  Enzymatic Nucleic Acid
aguagacacugaugaggccguuaggccgaaaguuuuau

SEQ ID NO: 12373 - RNA, 38 nt, Artificial Sequence
  Description of Artificial Sequence:  Enzymatic Nucleic Acid
aaccaguacugaugaggccguuaggccgaaacauaguu

SEQ ID NO: 12374 - RNA, 38 nt, Artificial Sequence
  Description of Artificial Sequence:  Enzymatic Nucleic Acid
gaaaccagcugaugaggccguuaggccgaaagacauag

SEQ ID NO: 12375 - RNA, 38 nt, Artificial Sequence
  Description of Artificial Sequence:  Enzymatic Nucleic Acid
caggcagacugaugaggccguuaggccgaaaccaguag

SEQ ID NO: 12376 - RNA, 38 nt, Artificial Sequence
  Description of Artificial Sequence:  Enzymatic Nucleic Acid
acaggcagcugaugaggccguuaggccgaaaaccagua

SEQ ID NO: 12377 - RNA, 38 nt, Artificial Sequence
  Description of Artificial Sequence:  Enzymatic Nucleic Acid
cacaggcacugaugaggccguuaggccgaaaaaccagu

SEQ ID NO: 12378 - RNA, 54 nt, Artificial Sequence
  Description of Artificial Sequence:  Enzymatic Nucleic Acid
gggacacaagaagggcccaccagagaaacacacguugugguacauuaccuggua

SEQ ID NO: 12379 - RNA, 54 nt, Artificial Sequence
  Description of Artificial Sequence:  Enzymatic Nucleic Acid
guuaucccagaagcgggaaccagagaaacacacguugugguacauuaccuggua

SEQ ID NO: 12380 - RNA, 54 nt, Artificial Sequence
  Description of Artificial Sequence:  Enzymatic Nucleic Acid
ggaaucggagaagccaggaccagagaaacacacguugugguacauuaccuggua

SEQ ID NO: 12381 - RNA, 54 nt, Artificial Sequence
  Description of Artificial Sequence:  Enzymatic Nucleic Acid
uccgcggaagaaggucagaccagagaaacacacguugugguacauuaccuggua

SEQ ID NO: 12382 - RNA, 54 nt, Artificial Sequence
  Description of Artificial Sequence:  Enzymatic Nucleic Acid
cggcugucagaaguguccaccagagaaacacacguugugguacauuaccuggua

SEQ ID NO: 12383 - RNA, 54 nt, Artificial Sequence
  Description of Artificial Sequence:  Enzymatic Nucleic Acid
ccagccgcagaagucagcaccagagaaacacacguugugguacauuaccuggua

SEQ ID NO: 12384 - RNA, 54 nt, Artificial Sequence
  Description of Artificial Sequence:  Enzymatic Nucleic Acid
cuggcuccagaagcggcuaccagagaaacacacguugugguacauuaccuggua

SEQ ID NO: 12385 - RNA, 54 nt, Artificial Sequence
  Description of Artificial Sequence:  Enzymatic Nucleic Acid
cagcgcaaagaaggggagaccagagaaacacacguugugguacauuaccuggua

SEQ ID NO: 12386 - RNA, 54 nt, Artificial Sequence
  Description of Artificial Sequence:  Enzymatic Nucleic Acid
gucacagaagaaguauggaccagagaaacacacguugugguacauuaccuggua

SEQ ID NO: 12387 - RNA, 54 nt, Artificial Sequence
  Description of Artificial Sequence:  Enzymatic Nucleic Acid
cacagagcagaagcuagcaccagagaaacacacguugugguacauuaccuggua

SEQ ID NO: 12388 - RNA, 54 nt, Artificial Sequence
  Description of Artificial Sequence:  Enzymatic Nucleic Acid
cccacagaagaagcucggaccagagaaacacacguugugguacauuaccuggua

SEQ ID NO: 12389 - RNA, 54 nt, Artificial Sequence
  Description of Artificial Sequence:  Enzymatic Nucleic Acid
ugcaaguaagaagaagggaccagagaaacacacguugugguacauuaccuggua

SEQ ID NO: 12390 - RNA, 54 nt, Artificial Sequence
  Description of Artificial Sequence:  Enzymatic Nucleic Acid
uagacauaagaaguggagaccagagaaacacacguugugguacauuaccuggua

SEQ ID NO: 12391 - RNA, 54 nt, Artificial Sequence
  Description of Artificial Sequence:  Enzymatic Nucleic Acid
gaauggugagaaguaaucaccagagaaacacacguugugguacauuaccuggua

SEQ ID NO: 12392 - RNA, 54 nt, Artificial Sequence
  Description of Artificial Sequence:  Enzymatic Nucleic Acid
cgacccucagaaggggauaccagagaaacacacguugugguacauuaccuggua

SEQ ID NO: 12393 - RNA, 54 nt, Artificial Sequence
  Description of Artificial Sequence:  Enzymatic Nucleic Acid
cuguuuccagaaggaacaaccagagaaacacacguugugguacauuaccuggua

SEQ ID NO: 12394 - RNA, 54 nt, Artificial Sequence
  Description of Artificial Sequence:  Enzymatic Nucleic Acid
acaugauaagaagauaggaccagagaaacacacguugugguacauuaccuggua

SEQ ID NO: 12395 - RNA, 54 nt, Artificial Sequence
  Description of Artificial Sequence:  Enzymatic Nucleic Acid
uuuucuccagaagauagcaccagagaaacacacguugugguacauuaccuggua

SEQ ID NO: 12396 - RNA, 54 nt, Artificial Sequence
  Description of Artificial Sequence:  Enzymatic Nucleic Acid
ucuugaucagaaguccacaccagagaaacacacguugugguacauuaccuggua

SEQ ID NO: 12397 - RNA, 54 nt, Artificial Sequence
  Description of Artificial Sequence:  Enzymatic Nucleic Acid
auaucaggagaaggguaaaccagagaaacacacguugugguacauuaccuggua

SEQ ID NO: 12398 - RNA, 54 nt, Artificial Sequence
  Description of Artificial Sequence:  Enzymatic Nucleic Acid
ucucaccgagaaggggugaccagagaaacacacguugugguacauuaccuggua

SEQ ID NO: 12399 - RNA, 54 nt, Artificial Sequence
  Description of Artificial Sequence:  Enzymatic Nucleic Acid
uuggcguaagaagugcauaccagagaaacacacguugugguacauuaccuggua

SEQ ID NO: 12400 - RNA, 54 nt, Artificial Sequence
  Description of Artificial Sequence:  Enzymatic Nucleic Acid
ucuguaggagaaggcuucaccagagaaacacacguugugguacauuaccuggua

SEQ ID NO: 12401 - RNA, 54 nt, Artificial Sequence
  Description of Artificial Sequence:  Enzymatic Nucleic Acid
uuggccggagaaguaggaaccagagaaacacacguugugguacauuaccuggua

SEQ ID NO: 12402 - RNA, 54 nt, Artificial Sequence
  Description of Artificial Sequence:  Enzymatic Nucleic Acid
uuccuucaagaagggcauaccagagaaacacacguugugguacauuaccuggua

SEQ ID NO: 12403 - RNA, 54 nt, Artificial Sequence
  Description of Artificial Sequence:  Enzymatic Nucleic Acid
ggcugggcagaagguugcaccagagaaacacacguugugguacauuaccuggua

SEQ ID NO: 12404 - RNA, 54 nt, Artificial Sequence
  Description of Artificial Sequence:  Enzymatic Nucleic Acid
guuggcugagaagcagguaccagagaaacacacguugugguacauuaccuggua

SEQ ID NO: 12405 - RNA, 54 nt, Artificial Sequence
  Description of Artificial Sequence:  Enzymatic Nucleic Acid
cagugcacagaagggacaaccagagaaacacacguugugguacauuaccuggua

SEQ ID NO: 12406 - RNA, 54 nt, Artificial Sequence
  Description of Artificial Sequence:  Enzymatic Nucleic Acid
cccaugugagaagauguuaccagagaaacacacguugugguacauuaccuggua

SEQ ID NO: 12407 - RNA, 54 nt, Artificial Sequence
  Description of Artificial Sequence:  Enzymatic Nucleic Acid
uuaucuugagaagagcaaaccagagaaacacacguugugguacauuaccuggua

SEQ ID NO: 12408 - RNA, 54 nt, Artificial Sequence
  Description of Artificial Sequence:  Enzymatic Nucleic Acid
ggaugaugagaaguuugaaccagagaaacacacguugugguacauuaccuggua

SEQ ID NO: 12409 - RNA, 54 nt, Artificial Sequence
  Description of Artificial Sequence:  Enzymatic Nucleic Acid
ugcggauaagaagguuccaccagagaaacacacguugugguacauuaccuggua

SEQ ID NO: 12410 - RNA, 54 nt, Artificial Sequence
  Description of Artificial Sequence:  Enzymatic Nucleic Acid
gcuuaacgagaaguaggaaccagagaaacacacguugugguacauuaccuggua

SEQ ID NO: 12411 - RNA, 54 nt, Artificial Sequence
  Description of Artificial Sequence:  Enzymatic Nucleic Acid
ggcaauucagaaggauccaccagagaaacacacguugugguacauuaccuggua

SEQ ID NO: 12412 - RNA, 54 nt, Artificial Sequence
  Description of Artificial Sequence:  Enzymatic Nucleic Acid
cuaguuucagaaggucccaccagagaaacacacguugugguacauuaccuggua

SEQ ID NO: 12413 - RNA, 54 nt, Artificial Sequence
  Description of Artificial Sequence:  Enzymatic Nucleic Acid
ccaaaagcagaagccucaaccagagaaacacacguugugguacauuaccuggua

SEQ ID NO: 12414 - RNA, 54 nt, Artificial Sequence
  Description of Artificial Sequence:  Enzymatic Nucleic Acid
aaagccugagaaggcagaaccagagaaacacacguugugguacauuaccuggua

SEQ ID NO: 12415 - RNA, 54 nt, Artificial Sequence
  Description of Artificial Sequence:  Enzymatic Nucleic Acid
ccgggccaagaagaagucaccagagaaacacacguugugguacauuaccuggua

SEQ ID NO: 12416 - RNA, 54 nt, Artificial Sequence
  Description of Artificial Sequence:  Enzymatic Nucleic Acid
cugacauaagaagggucuaccagagaaacacacguugugguacauuaccuggua

SEQ ID NO: 12417 - RNA, 54 nt, Artificial Sequence
  Description of Artificial Sequence:  Enzymatic Nucleic Acid
caaagggaagaaggcaucaccagagaaacacacguugugguacauuaccuggua

SEQ ID NO: 12418 - RNA, 54 nt, Artificial Sequence
  Description of Artificial Sequence:  Enzymatic Nucleic Acid
guaguguaagaaggagccaccagagaaacacacguugugguacauuaccuggua

SEQ ID NO: 12419 - RNA, 54 nt, Artificial Sequence
  Description of Artificial Sequence:  Enzymatic Nucleic Acid
cucaugccagaaguccagaccagagaaacacacguugugguacauuaccuggua

SEQ ID NO: 12420 - RNA, 54 nt, Artificial Sequence
  Description of Artificial Sequence:  Enzymatic Nucleic Acid
gugagguaagaagggagaaccagagaaacacacguugugguacauuaccuggua

SEQ ID NO: 12421 - RNA, 54 nt, Artificial Sequence
  Description of Artificial Sequence:  Enzymatic Nucleic Acid
uggcugucagaagggaucaccagagaaacacacguugugguacauuaccuggua

SEQ ID NO: 12422 - RNA, 54 nt, Artificial Sequence
  Description of Artificial Sequence:  Enzymatic Nucleic Acid
agccacugagaagguuggaccagagaaacacacguugugguacauuaccuggua

SEQ ID NO: 12423 - RNA, 54 nt, Artificial Sequence
  Description of Artificial Sequence:  Enzymatic Nucleic Acid
gauacccaagaagguagcaccagagaaacacacguugugguacauuaccuggua

SEQ ID NO: 12424 - RNA, 54 nt, Artificial Sequence
  Description of Artificial Sequence:  Enzymatic Nucleic Acid
ucagcgugagaagcagcaaccagagaaacacacguugugguacauuaccuggua

SEQ ID NO: 12425 - RNA, 54 nt, Artificial Sequence
  Description of Artificial Sequence:  Enzymatic Nucleic Acid
gucccugaagaagcgugaaccagagaaacacacguugugguacauuaccuggua

SEQ ID NO: 12426 - RNA, 54 nt, Artificial Sequence
  Description of Artificial Sequence:  Enzymatic Nucleic Acid
aggaggugagaagcagugaccagagaaacacacguugugguacauuaccuggua

SEQ ID NO: 12427 - RNA, 54 nt, Artificial Sequence
  Description of Artificial Sequence:  Enzymatic Nucleic Acid
uccauuuaagaaggagguaccagagaaacacacguugugguacauuaccuggua

SEQ ID NO: 12428 - RNA, 54 nt, Artificial Sequence
  Description of Artificial Sequence:  Enzymatic Nucleic Acid
ggagccggagaaggaccaaccagagaaacacacguugugguacauuaccuggua

SEQ ID NO: 12429 - RNA, 54 nt, Artificial Sequence
  Description of Artificial Sequence:  Enzymatic Nucleic Acid
gggggcggagaagggacaaccagagaaacacacguugugguacauuaccuggua

SEQ ID NO: 12430 - RNA, 54 nt, Artificial Sequence
  Description of Artificial Sequence:  Enzymatic Nucleic Acid
gaguugggagaagagccgaccagagaaacacacguugugguacauuaccuggua

SEQ ID NO: 12431 - RNA, 54 nt, Artificial Sequence
  Description of Artificial Sequence:  Enzymatic Nucleic Acid
aaaaucuaagaagcaccuaccagagaaacacacguugugguacauuaccuggua

SEQ ID NO: 12432 - RNA, 54 nt, Artificial Sequence
  Description of Artificial Sequence:  Enzymatic Nucleic Acid
uccuugcaagaagaggucaccagagaaacacacguugugguacauuaccuggua

SEQ ID NO: 12433 - RNA, 54 nt, Artificial Sequence
  Description of Artificial Sequence:  Enzymatic Nucleic Acid
gagaccacagaagggcacaccagagaaacacacguugugguacauuaccuggua

SEQ ID NO: 12434 - RNA, 54 nt, Artificial Sequence
  Description of Artificial Sequence:  Enzymatic Nucleic Acid
ucuuggagagaagaguccaccagagaaacacacguugugguacauuaccuggua

SEQ ID NO: 12435 - RNA, 54 nt, Artificial Sequence
  Description of Artificial Sequence:  Enzymatic Nucleic Acid
ccaagguaagaagacucgaccagagaaacacacguugugguacauuaccuggua

SEQ ID NO: 12436 - RNA, 54 nt, Artificial Sequence
  Description of Artificial Sequence:  Enzymatic Nucleic Acid
caggcuccagaagcucucaccagagaaacacacguugugguacauuaccuggua

SEQ ID NO: 12437 - RNA, 54 nt, Artificial Sequence
  Description of Artificial Sequence:  Enzymatic Nucleic Acid
cacaaugcagaagcaggcaccagagaaacacacguugugguacauuaccuggua

SEQ ID NO: 12438 - RNA, 54 nt, Artificial Sequence
  Description of Artificial Sequence:  Enzymatic Nucleic Acid
acccugccagaagccuuuaccagagaaacacacguugugguacauuaccuggua

SEQ ID NO: 12439 - RNA, 54 nt, Artificial Sequence
  Description of Artificial Sequence:  Enzymatic Nucleic Acid
uguaacccagaagugaagaccagagaaacacacguugugguacauuaccuggua

SEQ ID NO: 12440 - RNA, 54 nt, Artificial Sequence
  Description of Artificial Sequence:  Enzymatic Nucleic Acid
acguaagaagaaggaaggaccagagaaacacacguugugguacauuaccuggua

SEQ ID NO: 12441 - RNA, 54 nt, Artificial Sequence
  Description of Artificial Sequence:  Enzymatic Nucleic Acid
aaggagcaagaagcaucaaccagagaaacacacguugugguacauuaccuggua

SEQ ID NO: 12442 - RNA, 54 nt, Artificial Sequence
  Description of Artificial Sequence:  Enzymatic Nucleic Acid
ucggccccagaaggagccaccagagaaacacacguugugguacauuaccuggua

SEQ ID NO: 12443 - RNA, 54 nt, Artificial Sequence
  Description of Artificial Sequence:  Enzymatic Nucleic Acid
cuccacccagaagaaaccaccagagaaacacacguugugguacauuaccuggua

SEQ ID NO: 12444 - RNA, 54 nt, Artificial Sequence
  Description of Artificial Sequence:  Enzymatic Nucleic Acid
uuucugccagaaggaagcaccagagaaacacacguugugguacauuaccuggua

SEQ ID NO: 12445 - RNA, 54 nt, Artificial Sequence
  Description of Artificial Sequence:  Enzymatic Nucleic Acid
auuucgaaagaaggcuagaccagagaaacacacguugugguacauuaccuggua

SEQ ID NO: 12446 - RNA, 54 nt, Artificial Sequence
  Description of Artificial Sequence:  Enzymatic Nucleic Acid
agcacacaagaagaaaccaccagagaaacacacguugugguacauuaccuggua

SEQ ID NO: 12447 - RNA, 38 nt, Artificial Sequence
  Description of Artificial Sequence:  Enzymatic Nucleic Acid
gugagcaacugaugaggccguuaggccgaaacgcggcc

SEQ ID NO: 12448 - RNA, 38 nt, Artificial Sequence
  Description of Artificial Sequence:  Enzymatic Nucleic Acid
uggugagccugaugaggccguuaggccgaaagacgcgg

SEQ ID NO: 12449 - RNA, 38 nt, Artificial Sequence
  Description of Artificial Sequence:  Enzymatic Nucleic Acid
accauggucugaugaggccguuaggccgaaagcaagac

SEQ ID NO: 12450 - RNA, 38 nt, Artificial Sequence
  Description of Artificial Sequence:  Enzymatic Nucleic Acid
cagcagcucugaugaggccguuaggccgaaaccauggu

SEQ ID NO: 12451 - RNA, 38 nt, Artificial Sequence
  Description of Artificial Sequence:  Enzymatic Nucleic Acid
uaaggcaacugaugaggccguuaggccgaaaccgcggu

SEQ ID NO: 12452 - RNA, 38 nt, Artificial Sequence
  Description of Artificial Sequence:  Enzymatic Nucleic Acid
cguaaggccugaugaggccguuaggccgaaagaccgcg

SEQ ID NO: 12453 - RNA, 38 nt, Artificial Sequence
  Description of Artificial Sequence:  Enzymatic Nucleic Acid
cagcgcgucugaugaggccguuaggccgaaaggcaaga

SEQ ID NO: 12454 - RNA, 38 nt, Artificial Sequence
  Description of Artificial Sequence:  Enzymatic Nucleic Acid
gcagcgcgcugaugaggccguuaggccgaaaaggcaag

SEQ ID NO: 12455 - RNA, 38 nt, Artificial Sequence
  Description of Artificial Sequence:  Enzymatic Nucleic Acid
agacaccccugaugaggccguuaggccgaaagcagcgc

SEQ ID NO: 12456 - RNA, 38 nt, Artificial Sequence
  Description of Artificial Sequence:  Enzymatic Nucleic Acid
gagaagcacugaugaggccguuaggccgaaacacccga

SEQ ID NO: 12457 - RNA, 38 nt, Artificial Sequence
  Description of Artificial Sequence:  Enzymatic Nucleic Acid
uauccugucugaugaggccguuaggccgaaagaagcag

SEQ ID NO: 12458 - RNA, 38 nt, Artificial Sequence
  Description of Artificial Sequence:  Enzymatic Nucleic Acid
cugagccacugaugaggccguuaggccgaaauccugug

SEQ ID NO: 12459 - RNA, 38 nt, Artificial Sequence
  Description of Artificial Sequence:  Enzymatic Nucleic Acid
ucgacccucugaugaggccguuaggccgaaagccauau

SEQ ID NO: 12460 - RNA, 38 nt, Artificial Sequence
  Description of Artificial Sequence:  Enzymatic Nucleic Acid
uuaacuuccugaugaggccguuaggccgaaacccugag

SEQ ID NO: 12461 - RNA, 38 nt, Artificial Sequence
  Description of Artificial Sequence:  Enzymatic Nucleic Acid
gcacuuuucugaugaggccguuaggccgaaacuucgac

SEQ ID NO: 12462 - RNA, 38 nt, Artificial Sequence
  Description of Artificial Sequence:  Enzymatic Nucleic Acid
ggcacuuucugaugaggccguuaggccgaaaacuucga

SEQ ID NO: 12463 - RNA, 38 nt, Artificial Sequence
  Description of Artificial Sequence:  Enzymatic Nucleic Acid
gcuugcaucugaugaggccguuaggccgaaacaugcug

SEQ ID NO: 12464 - RNA, 38 nt, Artificial Sequence
  Description of Artificial Sequence:  Enzymatic Nucleic Acid
gagaaagacugaugaggccguuaggccgaaagucuggc

SEQ ID NO: 12465 - RNA, 38 nt, Artificial Sequence
  Description of Artificial Sequence:  Enzymatic Nucleic Acid
uugagaaacugaugaggccguuaggccgaaagagucug

SEQ ID NO: 12466 - RNA, 38 nt, Artificial Sequence
  Description of Artificial Sequence:  Enzymatic Nucleic Acid
acuugagacugaugaggccguuaggccgaaagagaguc

SEQ ID NO: 12467 - RNA, 38 nt, Artificial Sequence
  Description of Artificial Sequence:  Enzymatic Nucleic Acid
cacuugagcugaugaggccguuaggccgaaaagagagu

SEQ ID NO: 12468 - RNA, 38 nt, Artificial Sequence
  Description of Artificial Sequence:  Enzymatic Nucleic Acid
gcacuugacugaugaggccguuaggccgaaaaagagag

SEQ ID NO: 12469 - RNA, 38 nt, Artificial Sequence
  Description of Artificial Sequence:  Enzymatic Nucleic Acid
cugcacuucugaugaggccguuaggccgaaagaaagag

SEQ ID NO: 12470 - RNA, 38 nt, Artificial Sequence
  Description of Artificial Sequence:  Enzymatic Nucleic Acid
gagaccaucugaugaggccguuaggccgaaagugggcu

SEQ ID NO: 12471 - RNA, 38 nt, Artificial Sequence
  Description of Artificial Sequence:  Enzymatic Nucleic Acid
ugggcagacugaugaggccguuaggccgaaaccaugag

SEQ ID NO: 12472 - RNA, 38 nt, Artificial Sequence
  Description of Artificial Sequence:  Enzymatic Nucleic Acid
cgugggcacugaugaggccguuaggccgaaagaccaug

SEQ ID NO: 12473 - RNA, 38 nt, Artificial Sequence
  Description of Artificial Sequence:  Enzymatic Nucleic Acid
gggggagucugaugaggccguuaggccgaaaugcucag

SEQ ID NO: 12474 - RNA, 38 nt, Artificial Sequence
  Description of Artificial Sequence:  Enzymatic Nucleic Acid
cgauggggcugaugaggccguuaggccgaaagugaugc

SEQ ID NO: 12475 - RNA, 38 nt, Artificial Sequence
  Description of Artificial Sequence:  Enzymatic Nucleic Acid
cacaggcccugaugaggccguuaggccgaaauggggga

SEQ ID NO: 12476 - RNA, 38 nt, Artificial Sequence
  Description of Artificial Sequence:  Enzymatic Nucleic Acid
uugccugucugaugaggccguuaggccgaaaucccucc

SEQ ID NO: 12477 - RNA, 38 nt, Artificial Sequence
  Description of Artificial Sequence:  Enzymatic Nucleic Acid
ugcugcagcugaugaggccguuaggccgaaauugccug

SEQ ID NO: 12478 - RNA, 38 nt, Artificial Sequence
  Description of Artificial Sequence:  Enzymatic Nucleic Acid
gugcugcacugaugaggccguuaggccgaaaauugccu

SEQ ID NO: 12479 - RNA, 38 nt, Artificial Sequence
  Description of Artificial Sequence:  Enzymatic Nucleic Acid
ccaagguccugaugaggccguuaggccgaaaggugcug

SEQ ID NO: 12480 - RNA, 38 nt, Artificial Sequence
  Description of Artificial Sequence:  Enzymatic Nucleic Acid
ccgugucccugaugaggccguuaggccgaaaggucaag

SEQ ID NO: 12481 - RNA, 38 nt, Artificial Sequence
  Description of Artificial Sequence:  Enzymatic Nucleic Acid
cagguguacugaugaggccguuaggccgaaaggcccgu

SEQ ID NO: 12482 - RNA, 38 nt, Artificial Sequence
  Description of Artificial Sequence:  Enzymatic Nucleic Acid
uacaggugcugaugaggccguuaggccgaaagaggccc

SEQ ID NO: 12483 - RNA, 38 nt, Artificial Sequence
  Description of Artificial Sequence:  Enzymatic Nucleic Acid
gagguauccugaugaggccguuaggccgaaacaggugu

SEQ ID NO: 12484 - RNA, 38 nt, Artificial Sequence
  Description of Artificial Sequence:  Enzymatic Nucleic Acid
uagggaggcugaugaggccguuaggccgaaaucuacag

SEQ ID NO: 12485 - RNA, 38 nt, Artificial Sequence
  Description of Artificial Sequence:  Enzymatic Nucleic Acid
gauguaggcugaugaggccguuaggccgaaagguaucu

SEQ ID NO: 12486 - RNA, 38 nt, Artificial Sequence
  Description of Artificial Sequence:  Enzymatic Nucleic Acid
aguagaugcugaugaggccguuaggccgaaagggaggu

SEQ ID NO: 12487 - RNA, 38 nt, Artificial Sequence
  Description of Artificial Sequence:  Enzymatic Nucleic Acid
ucgaaguacugaugaggccguuaggccgaaauguaggg

SEQ ID NO: 12488 - RNA, 38 nt, Artificial Sequence
  Description of Artificial Sequence:  Enzymatic Nucleic Acid
cuucgaagcugaugaggccguuaggccgaaagauguag

SEQ ID NO: 12489 - RNA, 38 nt, Artificial Sequence
  Description of Artificial Sequence:  Enzymatic Nucleic Acid
uuucuucgcugaugaggccguuaggccgaaaguagaug

SEQ ID NO: 12490 - RNA, 38 nt, Artificial Sequence
  Description of Artificial Sequence:  Enzymatic Nucleic Acid
uuuucuuccugaugaggccguuaggccgaaaaguagau

SEQ ID NO: 12491 - RNA, 38 nt, Artificial Sequence
  Description of Artificial Sequence:  Enzymatic Nucleic Acid
agauugaacugaugaggccguuaggccgaaauuccgcu

SEQ ID NO: 12492 - RNA, 38 nt, Artificial Sequence
  Description of Artificial Sequence:  Enzymatic Nucleic Acid
guagauugcugaugaggccguuaggccgaaagauuccg

SEQ ID NO: 12493 - RNA, 38 nt, Artificial Sequence
  Description of Artificial Sequence:  Enzymatic Nucleic Acid
uguagauucugaugaggccguuaggccgaaaagauucc

SEQ ID NO: 12494 - RNA, 38 nt, Artificial Sequence
  Description of Artificial Sequence:  Enzymatic Nucleic Acid
aauauguacugaugaggccguuaggccgaaauugaaga

SEQ ID NO: 12495 - RNA, 38 nt, Artificial Sequence
  Description of Artificial Sequence:  Enzymatic Nucleic Acid
caaauaugcugaugaggccguuaggccgaaagauugaa

SEQ ID NO: 12496 - RNA, 38 nt, Artificial Sequence
  Description of Artificial Sequence:  Enzymatic Nucleic Acid
cuaacaaacugaugaggccguuaggccgaaauguagau

SEQ ID NO: 12497 - RNA, 38 nt, Artificial Sequence
  Description of Artificial Sequence:  Enzymatic Nucleic Acid
cacuaacacugaugaggccguuaggccgaaauauguag

SEQ ID NO: 12498 - RNA, 38 nt, Artificial Sequence
  Description of Artificial Sequence:  Enzymatic Nucleic Acid
ucacuaaccugaugaggccguuaggccgaaaauaugua

SEQ ID NO: 12499 - RNA, 38 nt, Artificial Sequence
  Description of Artificial Sequence:  Enzymatic Nucleic Acid
gcaucacucugaugaggccguuaggccgaaacaaauau

SEQ ID NO: 12500 - RNA, 38 nt, Artificial Sequence
  Description of Artificial Sequence:  Enzymatic Nucleic Acid
ugcaucaccugaugaggccguuaggccgaaaacaaaua

SEQ ID NO: 12501 - RNA, 38 nt, Artificial Sequence
  Description of Artificial Sequence:  Enzymatic Nucleic Acid
uaugaaagcugaugaggccguuaggccgaaacucccug

SEQ ID NO: 12502 - RNA, 38 nt, Artificial Sequence
  Description of Artificial Sequence:  Enzymatic Nucleic Acid
cucuaugacugaugaggccguuaggccgaaaggacucc

SEQ ID NO: 12503 - RNA, 38 nt, Artificial Sequence
  Description of Artificial Sequence:  Enzymatic Nucleic Acid
ucucuaugcugaugaggccguuaggccgaaaaggacuc

SEQ ID NO: 12504 - RNA, 38 nt, Artificial Sequence
  Description of Artificial Sequence:  Enzymatic Nucleic Acid
aucucuaucugaugaggccguuaggccgaaaaaggacu

SEQ ID NO: 12505 - RNA, 38 nt, Artificial Sequence
  Description of Artificial Sequence:  Enzymatic Nucleic Acid
ugcaucuccugaugaggccguuaggccgaaaugaaagg

SEQ ID NO: 12506 - RNA, 38 nt, Artificial Sequence
  Description of Artificial Sequence:  Enzymatic Nucleic Acid
aguuugggcugaugaggccguuaggccgaaaugucagu

SEQ ID NO: 12507 - RNA, 38 nt, Artificial Sequence
  Description of Artificial Sequence:  Enzymatic Nucleic Acid
augugcaccugaugaggccguuaggccgaaaguuuggg

SEQ ID NO: 12508 - RNA, 38 nt, Artificial Sequence
  Description of Artificial Sequence:  Enzymatic Nucleic Acid
gggaugaucugaugaggccguuaggccgaaagcugucu

SEQ ID NO: 12509 - RNA, 38 nt, Artificial Sequence
  Description of Artificial Sequence:  Enzymatic Nucleic Acid
caggggaucugaugaggccguuaggccgaaaugagcug

SEQ ID NO: 12510 - RNA, 38 nt, Artificial Sequence
  Description of Artificial Sequence:  Enzymatic Nucleic Acid
cggcagggcugaugaggccguuaggccgaaaugaugag

SEQ ID NO: 12511 - RNA, 38 nt, Artificial Sequence
  Description of Artificial Sequence:  Enzymatic Nucleic Acid
cguugggucugaugaggccguuaggccgaaacgucacc

SEQ ID NO: 12512 - RNA, 38 nt, Artificial Sequence
  Description of Artificial Sequence:  Enzymatic Nucleic Acid
gugacugucugaugaggccguuaggccgaaacguuggg

SEQ ID NO: 12513 - RNA, 38 nt, Artificial Sequence
  Description of Artificial Sequence:  Enzymatic Nucleic Acid
uuuagggucugaugaggccguuaggccgaaacugugac

SEQ ID NO: 12514 - RNA, 38 nt, Artificial Sequence
  Description of Artificial Sequence:  Enzymatic Nucleic Acid
aacuuuuucugaugaggccguuaggccgaaagggugac

SEQ ID NO: 12515 - RNA, 38 nt, Artificial Sequence
  Description of Artificial Sequence:  Enzymatic Nucleic Acid
caaauggacugaugaggccguuaggccgaaacuuuuuu

SEQ ID NO: 12516 - RNA, 38 nt, Artificial Sequence
  Description of Artificial Sequence:  Enzymatic Nucleic Acid
ucaaauggcugaugaggccguuaggccgaaaacuuuuu

SEQ ID NO: 12517 - RNA, 38 nt, Artificial Sequence
  Description of Artificial Sequence:  Enzymatic Nucleic Acid
aucaaaugcugaugaggccguuaggccgaaaaacuuuu

SEQ ID NO: 12518 - RNA, 38 nt, Artificial Sequence
  Description of Artificial Sequence:  Enzymatic Nucleic Acid
gaguaucacugaugaggccguuaggccgaaauggaaac

SEQ ID NO: 12519 - RNA, 38 nt, Artificial Sequence
  Description of Artificial Sequence:  Enzymatic Nucleic Acid
agaguauccugaugaggccguuaggccgaaaauggaaa

SEQ ID NO: 12520 - RNA, 38 nt, Artificial Sequence
  Description of Artificial Sequence:  Enzymatic Nucleic Acid
gguaagagcugaugaggccguuaggccgaaaucaaaug

SEQ ID NO: 12521 - RNA, 38 nt, Artificial Sequence
  Description of Artificial Sequence:  Enzymatic Nucleic Acid
agggguaacugaugaggccguuaggccgaaaguaucaa

SEQ ID NO: 12522 - RNA, 38 nt, Artificial Sequence
  Description of Artificial Sequence:  Enzymatic Nucleic Acid
ucaggggucugaugaggccguuaggccgaaagaguauc

SEQ ID NO: 12523 - RNA, 38 nt, Artificial Sequence
  Description of Artificial Sequence:  Enzymatic Nucleic Acid
aucaggggcugaugaggccguuaggccgaaaagaguau

SEQ ID NO: 12524 - RNA, 38 nt, Artificial Sequence
  Description of Artificial Sequence:  Enzymatic Nucleic Acid
ucccaugucugaugaggccguuaggccgaaauucuuug

SEQ ID NO: 12525 - RNA, 38 nt, Artificial Sequence
  Description of Artificial Sequence:  Enzymatic Nucleic Acid
gccucucccugaugaggccguuaggccgaaacuguccc

SEQ ID NO: 12526 - RNA, 38 nt, Artificial Sequence
  Description of Artificial Sequence:  Enzymatic Nucleic Acid
cuauuauacugaugaggccguuaggccgaaagccucuc

SEQ ID NO: 12527 - RNA, 38 nt, Artificial Sequence
  Description of Artificial Sequence:  Enzymatic Nucleic Acid
gcuauuaucugaugaggccguuaggccgaaaagccucu

SEQ ID NO: 12528 - RNA, 38 nt, Artificial Sequence
  Description of Artificial Sequence:  Enzymatic Nucleic Acid
ugcuauuacugaugaggccguuaggccgaaaaagccuc

SEQ ID NO: 12529 - RNA, 38 nt, Artificial Sequence
  Description of Artificial Sequence:  Enzymatic Nucleic Acid
uuugcuaucugaugaggccguuaggccgaaauaaagcc

SEQ ID NO: 12530 - RNA, 38 nt, Artificial Sequence
  Description of Artificial Sequence:  Enzymatic Nucleic Acid
gcauuugccugaugaggccguuaggccgaaauuauaaa

SEQ ID NO: 12531 - RNA, 38 nt, Artificial Sequence
  Description of Artificial Sequence:  Enzymatic Nucleic Acid
ucucuuugcugaugaggccguuaggccgaaacguugca

SEQ ID NO: 12532 - RNA, 38 nt, Artificial Sequence
  Description of Artificial Sequence:  Enzymatic Nucleic Acid
agcagucccugaugaggccguuaggccgaaaucucuuu

SEQ ID NO: 12533 - RNA, 38 nt, Artificial Sequence
  Description of Artificial Sequence:  Enzymatic Nucleic Acid
ugcccguucugaugaggccguuaggccgaaacgguggc

SEQ ID NO: 12534 - RNA, 38 nt, Artificial Sequence
  Description of Artificial Sequence:  Enzymatic Nucleic Acid
uugucuggcugaugaggccguuaggccgaaacaggugc

SEQ ID NO: 12535 - RNA, 38 nt, Artificial Sequence
  Description of Artificial Sequence:  Enzymatic Nucleic Acid
gggucagacugaugaggccguuaggccgaaaguuuguc

SEQ ID NO: 12536 - RNA, 38 nt, Artificial Sequence
  Description of Artificial Sequence:  Enzymatic Nucleic Acid
augggucacugaugaggccguuaggccgaaauaguuug

SEQ ID NO: 12537 - RNA, 38 nt, Artificial Sequence
  Description of Artificial Sequence:  Enzymatic Nucleic Acid
ggucugcccugaugaggccguuaggccgaaauggguca

SEQ ID NO: 12538 - RNA, 38 nt, Artificial Sequence
  Description of Artificial Sequence:  Enzymatic Nucleic Acid
uaggauugcugaugaggccguuaggccgaaauuggucu

SEQ ID NO: 12539 - RNA, 38 nt, Artificial Sequence
  Description of Artificial Sequence:  Enzymatic Nucleic Acid
acaucuagcugaugaggccguuaggccgaaauuguauu

SEQ ID NO: 12540 - RNA, 38 nt, Artificial Sequence
  Description of Artificial Sequence:  Enzymatic Nucleic Acid
uggacauccugaugaggccguuaggccgaaaggauugu

SEQ ID NO: 12541 - RNA, 38 nt, Artificial Sequence
  Description of Artificial Sequence:  Enzymatic Nucleic Acid
cguauuugcugaugaggccguuaggccgaaacaucuag

SEQ ID NO: 12542 - RNA, 38 nt, Artificial Sequence
  Description of Artificial Sequence:  Enzymatic Nucleic Acid
ggcgggcgcugaugaggccguuaggccgaaauuuggac

SEQ ID NO: 12543 - RNA, 38 nt, Artificial Sequence
  Description of Artificial Sequence:  Enzymatic Nucleic Acid
ugcccgugcugaugaggccguuaggccgaaagcagucu

SEQ ID NO: 12544 - RNA, 38 nt, Artificial Sequence
  Description of Artificial Sequence:  Enzymatic Nucleic Acid
gaggacaacugaugaggccguuaggccgaaagucugcc

SEQ ID NO: 12545 - RNA, 38 nt, Artificial Sequence
  Description of Artificial Sequence:  Enzymatic Nucleic Acid
uugaggaccugaugaggccguuaggccgaaagagucug

SEQ ID NO: 12546 - RNA, 38 nt, Artificial Sequence
  Description of Artificial Sequence:  Enzymatic Nucleic Acid
caguugagcugaugaggccguuaggccgaaacaagagu

SEQ ID NO: 12547 - RNA, 38 nt, Artificial Sequence
  Description of Artificial Sequence:  Enzymatic Nucleic Acid
gugcaguucugaugaggccguuaggccgaaaggacaag

SEQ ID NO: 12548 - RNA, 38 nt, Artificial Sequence
  Description of Artificial Sequence:  Enzymatic Nucleic Acid
cucguauucugaugaggccguuaggccgaaagcuccgu

SEQ ID NO: 12549 - RNA, 38 nt, Artificial Sequence
  Description of Artificial Sequence:  Enzymatic Nucleic Acid
cacccucgcugaugaggccguuaggccgaaauugagcu

SEQ ID NO: 12550 - RNA, 38 nt, Artificial Sequence
  Description of Artificial Sequence:  Enzymatic Nucleic Acid
accagggucugaugaggccguuaggccgaaauuccagc

SEQ ID NO: 12551 - RNA, 38 nt, Artificial Sequence
  Description of Artificial Sequence:  Enzymatic Nucleic Acid
uaccagggcugaugaggccguuaggccgaaaauuccag

SEQ ID NO: 12552 - RNA, 38 nt, Artificial Sequence
  Description of Artificial Sequence:  Enzymatic Nucleic Acid
aguugcuucugaugaggccguuaggccgaaaccagggu

SEQ ID NO: 12553 - RNA, 38 nt, Artificial Sequence
  Description of Artificial Sequence:  Enzymatic Nucleic Acid
ugcucucucugaugaggccguuaggccgaaaguugcuu

SEQ ID NO: 12554 - RNA, 38 nt, Artificial Sequence
  Description of Artificial Sequence:  Enzymatic Nucleic Acid
gccuuauacugaugaggccguuaggccgaaaugcucuc

SEQ ID NO: 12555 - RNA, 38 nt, Artificial Sequence
  Description of Artificial Sequence:  Enzymatic Nucleic Acid
cugccuuacugaugaggccguuaggccgaaagaugcuc

SEQ ID NO: 12556 - RNA, 38 nt, Artificial Sequence
  Description of Artificial Sequence:  Enzymatic Nucleic Acid
cgcugccucugaugaggccguuaggccgaaauagaugc

SEQ ID NO: 12557 - RNA, 38 nt, Artificial Sequence
  Description of Artificial Sequence:  Enzymatic Nucleic Acid
cuccgguccugaugaggccguuaggccgaaauccgcug

SEQ ID NO: 12558 - RNA, 38 nt, Artificial Sequence
  Description of Artificial Sequence:  Enzymatic Nucleic Acid
guugugggcugaugaggccguuaggccgaaauggcucc

SEQ ID NO: 12559 - RNA, 38 nt, Artificial Sequence
  Description of Artificial Sequence:  Enzymatic Nucleic Acid
uguuguggcugaugaggccguuaggccgaaaauggcuc

SEQ ID NO: 12560 - RNA, 38 nt, Artificial Sequence
  Description of Artificial Sequence:  Enzymatic Nucleic Acid
cacuguggcugaugaggccguuaggccgaaacacauug

SEQ ID NO: 12561 - RNA, 38 nt, Artificial Sequence
  Description of Artificial Sequence:  Enzymatic Nucleic Acid
acacugugcugaugaggccguuaggccgaaaacacauu

SEQ ID NO: 12562 - RNA, 38 nt, Artificial Sequence
  Description of Artificial Sequence:  Enzymatic Nucleic Acid
aucuuaagcugaugaggccguuaggccgaaacacugug

SEQ ID NO: 12563 - RNA, 38 nt, Artificial Sequence
  Description of Artificial Sequence:  Enzymatic Nucleic Acid
gaucuuaacugaugaggccguuaggccgaaaacacugu

SEQ ID NO: 12564 - RNA, 38 nt, Artificial Sequence
  Description of Artificial Sequence:  Enzymatic Nucleic Acid
uugaucuucugaugaggccguuaggccgaaagaacacu

SEQ ID NO: 12565 - RNA, 38 nt, Artificial Sequence
  Description of Artificial Sequence:  Enzymatic Nucleic Acid
guugaucucugaugaggccguuaggccgaaaagaacac

SEQ ID NO: 12566 - RNA, 38 nt, Artificial Sequence
  Description of Artificial Sequence:  Enzymatic Nucleic Acid
acauuguucugaugaggccguuaggccgaaaucuuaag

SEQ ID NO: 12567 - RNA, 38 nt, Artificial Sequence
  Description of Artificial Sequence:  Enzymatic Nucleic Acid
cagguguacugaugaggccguuaggccgaaagccccuu

SEQ ID NO: 12568 - RNA, 38 nt, Artificial Sequence
  Description of Artificial Sequence:  Enzymatic Nucleic Acid
gacaggugcugaugaggccguuaggccgaaagagcccc

SEQ ID NO: 12569 - RNA, 38 nt, Artificial Sequence
  Description of Artificial Sequence:  Enzymatic Nucleic Acid
cuucacgccugaugaggccguuaggccgaaacaggugu

SEQ ID NO: 12570 - RNA, 38 nt, Artificial Sequence
  Description of Artificial Sequence:  Enzymatic Nucleic Acid
ggaacgagcugaugaggccguuaggccgaaacccacuc

SEQ ID NO: 12571 - RNA, 38 nt, Artificial Sequence
  Description of Artificial Sequence:  Enzymatic Nucleic Acid
acuggaaccugaugaggccguuaggccgaaaggaccca

SEQ ID NO: 12572 - RNA, 38 nt, Artificial Sequence
  Description of Artificial Sequence:  Enzymatic Nucleic Acid
aagacuggcugaugaggccguuaggccgaaacgaggac

SEQ ID NO: 12573 - RNA, 38 nt, Artificial Sequence
  Description of Artificial Sequence:  Enzymatic Nucleic Acid
aaagacugcugaugaggccguuaggccgaaaacgagga

SEQ ID NO: 12574 - RNA, 38 nt, Artificial Sequence
  Description of Artificial Sequence:  Enzymatic Nucleic Acid
uguugaaacugaugaggccguuaggccgaaacuggaac

SEQ ID NO: 12575 - RNA, 38 nt, Artificial Sequence
  Description of Artificial Sequence:  Enzymatic Nucleic Acid
gguguugacugaugaggccguuaggccgaaagacugga

SEQ ID NO: 12576 - RNA, 38 nt, Artificial Sequence
  Description of Artificial Sequence:  Enzymatic Nucleic Acid
agguguugcugaugaggccguuaggccgaaaagacugg

SEQ ID NO: 12577 - RNA, 38 nt, Artificial Sequence
  Description of Artificial Sequence:  Enzymatic Nucleic Acid
gagguguucugaugaggccguuaggccgaaaaagacug

SEQ ID NO: 12578 - RNA, 38 nt, Artificial Sequence
  Description of Artificial Sequence:  Enzymatic Nucleic Acid
caugcacgcugaugaggccguuaggccgaaagguguug

SEQ ID NO: 12579 - RNA, 38 nt, Artificial Sequence
  Description of Artificial Sequence:  Enzymatic Nucleic Acid
cuuuuucacugaugaggccguuaggccgaaacacaugc

SEQ ID NO: 12580 - RNA, 38 nt, Artificial Sequence
  Description of Artificial Sequence:  Enzymatic Nucleic Acid
cacugaugcugaugaggccguuaggccgaaauccuuuu

SEQ ID NO: 12581 - RNA, 38 nt, Artificial Sequence
  Description of Artificial Sequence:  Enzymatic Nucleic Acid
acacugaucugaugaggccguuaggccgaaaauccuuu

SEQ ID NO: 12582 - RNA, 38 nt, Artificial Sequence
  Description of Artificial Sequence:  Enzymatic Nucleic Acid
uucacacucugaugaggccguuaggccgaaaugaaucc

SEQ ID NO: 12583 - RNA, 38 nt, Artificial Sequence
  Description of Artificial Sequence:  Enzymatic Nucleic Acid
cugcuucccugaugaggccguuaggccgaaauguuuca

SEQ ID NO: 12584 - RNA, 38 nt, Artificial Sequence
  Description of Artificial Sequence:  Enzymatic Nucleic Acid
gccgauagcugaugaggccguuaggccgaaaccgucuu

SEQ ID NO: 12585 - RNA, 38 nt, Artificial Sequence
  Description of Artificial Sequence:  Enzymatic Nucleic Acid
acagccgacugaugaggccguuaggccgaaaggaccgu

SEQ ID NO: 12586 - RNA, 38 nt, Artificial Sequence
  Description of Artificial Sequence:  Enzymatic Nucleic Acid
ggacagcccugaugaggccguuaggccgaaauaggacc

SEQ ID NO: 12587 - RNA, 38 nt, Artificial Sequence
  Description of Artificial Sequence:  Enzymatic Nucleic Acid
cuuucaugcugaugaggccguuaggccgaaacagccga

SEQ ID NO: 12588 - RNA, 38 nt, Artificial Sequence
  Description of Artificial Sequence:  Enzymatic Nucleic Acid
gggaggggcugaugaggccguuaggccgaaaggccuuc

SEQ ID NO: 12589 - RNA, 38 nt, Artificial Sequence
  Description of Artificial Sequence:  Enzymatic Nucleic Acid
ggggagggcugaugaggccguuaggccgaaaaggccuu

SEQ ID NO: 12590 - RNA, 38 nt, Artificial Sequence
  Description of Artificial Sequence:  Enzymatic Nucleic Acid
uuucugggcugaugaggccguuaggccgaaaggggaag

SEQ ID NO: 12591 - RNA, 38 nt, Artificial Sequence
  Description of Artificial Sequence:  Enzymatic Nucleic Acid
aaccauaccugaugaggccguuaggccgaaauuucugg

SEQ ID NO: 12592 - RNA, 38 nt, Artificial Sequence
  Description of Artificial Sequence:  Enzymatic Nucleic Acid
uuuaaccacugaugaggccguuaggccgaaacgauuuc

SEQ ID NO: 12593 - RNA, 38 nt, Artificial Sequence
  Description of Artificial Sequence:  Enzymatic Nucleic Acid
caucuuuucugaugaggccguuaggccgaaaccauacg

SEQ ID NO: 12594 - RNA, 38 nt, Artificial Sequence
  Description of Artificial Sequence:  Enzymatic Nucleic Acid
uugcaggccugaugaggccguuaggccgaaagccaucu

SEQ ID NO: 12595 - RNA, 38 nt, Artificial Sequence
  Description of Artificial Sequence:  Enzymatic Nucleic Acid
cagacuuccugaugaggccguuaggccgaaauguugca

SEQ ID NO: 12596 - RNA, 38 nt, Artificial Sequence
  Description of Artificial Sequence:  Enzymatic Nucleic Acid
agcgagcacugaugaggccguuaggccgaaacuucaau

SEQ ID NO: 12597 - RNA, 38 nt, Artificial Sequence
  Description of Artificial Sequence:  Enzymatic Nucleic Acid
caaauagccugaugaggccguuaggccgaaagcagacu

SEQ ID NO: 12598 - RNA, 38 nt, Artificial Sequence
  Description of Artificial Sequence:  Enzymatic Nucleic Acid
guaccaaacugaugaggccguuaggccgaaagcgagca

SEQ ID NO: 12599 - RNA, 38 nt, Artificial Sequence
  Description of Artificial Sequence:  Enzymatic Nucleic Acid
auguaccacugaugaggccguuaggccgaaauagcgag

SEQ ID NO: 12600 - RNA, 38 nt, Artificial Sequence
  Description of Artificial Sequence:  Enzymatic Nucleic Acid
cauguacccugaugaggccguuaggccgaaaauagcga

SEQ ID NO: 12601 - RNA, 38 nt, Artificial Sequence
  Description of Artificial Sequence:  Enzymatic Nucleic Acid
uagccaugcugaugaggccguuaggccgaaaccaaaua

SEQ ID NO: 12602 - RNA, 38 nt, Artificial Sequence
  Description of Artificial Sequence:  Enzymatic Nucleic Acid
uuaaugagcugaugaggccguuaggccgaaagccaugu

SEQ ID NO: 12603 - RNA, 38 nt, Artificial Sequence
  Description of Artificial Sequence:  Enzymatic Nucleic Acid
uaauuaaucugaugaggccguuaggccgaaaguagcca

SEQ ID NO: 12604 - RNA, 38 nt, Artificial Sequence
  Description of Artificial Sequence:  Enzymatic Nucleic Acid
ugauaauucugaugaggccguuaggccgaaaugaguag

SEQ ID NO: 12605 - RNA, 38 nt, Artificial Sequence
  Description of Artificial Sequence:  Enzymatic Nucleic Acid
uugauaaucugaugaggccguuaggccgaaaaugagua

SEQ ID NO: 12606 - RNA, 38 nt, Artificial Sequence
  Description of Artificial Sequence:  Enzymatic Nucleic Acid
ucuuugaucugaugaggccguuaggccgaaauuaauga

SEQ ID NO: 12607 - RNA, 38 nt, Artificial Sequence
  Description of Artificial Sequence:  Enzymatic Nucleic Acid
aucuuugacugaugaggccguuaggccgaaaauuaaug

SEQ ID NO: 12608 - RNA, 38 nt, Artificial Sequence
  Description of Artificial Sequence:  Enzymatic Nucleic Acid
acaucuuucugaugaggccguuaggccgaaauaauuaa

SEQ ID NO: 12609 - RNA, 38 nt, Artificial Sequence
  Description of Artificial Sequence:  Enzymatic Nucleic Acid
agaucguacugaugaggccguuaggccgaaaguccccu

SEQ ID NO: 12610 - RNA, 38 nt, Artificial Sequence
  Description of Artificial Sequence:  Enzymatic Nucleic Acid
caagaucgcugaugaggccguuaggccgaaauaguccc

SEQ ID NO: 12611 - RNA, 38 nt, Artificial Sequence
  Description of Artificial Sequence:  Enzymatic Nucleic Acid
cccagcaacugaugaggccguuaggccgaaaucguaua

SEQ ID NO: 12612 - RNA, 38 nt, Artificial Sequence
  Description of Artificial Sequence:  Enzymatic Nucleic Acid
ugcccagccugaugaggccguuaggccgaaagaucgua

SEQ ID NO: 12613 - RNA, 38 nt, Artificial Sequence
  Description of Artificial Sequence:  Enzymatic Nucleic Acid
gacugcuucugaugaggccguuaggccgaaaugcccag

SEQ ID NO: 12614 - RNA, 38 nt, Artificial Sequence
  Description of Artificial Sequence:  Enzymatic Nucleic Acid
auagccuucugaugaggccguuaggccgaaacugcuuu

SEQ ID NO: 12615 - RNA, 38 nt, Artificial Sequence
  Description of Artificial Sequence:  Enzymatic Nucleic Acid
uuuuuaaacugaugaggccguuaggccgaaagccuuga

SEQ ID NO: 12616 - RNA, 38 nt, Artificial Sequence
  Description of Artificial Sequence:  Enzymatic Nucleic Acid
gguuuuuacugaugaggccguuaggccgaaauagccuu

SEQ ID NO: 12617 - RNA, 38 nt, Artificial Sequence
  Description of Artificial Sequence:  Enzymatic Nucleic Acid
agguuuuucugaugaggccguuaggccgaaaauagccu

SEQ ID NO: 12618 - RNA, 38 nt, Artificial Sequence
  Description of Artificial Sequence:  Enzymatic Nucleic Acid
gagguuuucugaugaggccguuaggccgaaaaauagcc

SEQ ID NO: 12619 - RNA, 38 nt, Artificial Sequence
  Description of Artificial Sequence:  Enzymatic Nucleic Acid
uacaaugacugaugaggccguuaggccgaaaguggcag

SEQ ID NO: 12620 - RNA, 38 nt, Artificial Sequence
  Description of Artificial Sequence:  Enzymatic Nucleic Acid
uuuacaaucugaugaggccguuaggccgaaagaguggc

SEQ ID NO: 12621 - RNA, 38 nt, Artificial Sequence
  Description of Artificial Sequence:  Enzymatic Nucleic Acid
acguuuaccugaugaggccguuaggccgaaaugagagu

SEQ ID NO: 12622 - RNA, 38 nt, Artificial Sequence
  Description of Artificial Sequence:  Enzymatic Nucleic Acid
uucacguucugaugaggccguuaggccgaaacaaugag

SEQ ID NO: 12623 - RNA, 38 nt, Artificial Sequence
  Description of Artificial Sequence:  Enzymatic Nucleic Acid
guagaucucugaugaggccguuaggccgaaagguuuca

SEQ ID NO: 12624 - RNA, 38 nt, Artificial Sequence
  Description of Artificial Sequence:  Enzymatic Nucleic Acid
uuuucguacugaugaggccguuaggccgaaaucugagg

SEQ ID NO: 12625 - RNA, 38 nt, Artificial Sequence
  Description of Artificial Sequence:  Enzymatic Nucleic Acid
acuuuucgcugaugaggccguuaggccgaaagaucuga

SEQ ID NO: 12626 - RNA, 38 nt, Artificial Sequence
  Description of Artificial Sequence:  Enzymatic Nucleic Acid
aggacacgcugaugaggccguuaggccgaaacuuuucg

SEQ ID NO: 12627 - RNA, 38 nt, Artificial Sequence
  Description of Artificial Sequence:  Enzymatic Nucleic Acid
gaagcgagcugaugaggccguuaggccgaaacacggac

SEQ ID NO: 12628 - RNA, 38 nt, Artificial Sequence
  Description of Artificial Sequence:  Enzymatic Nucleic Acid
uuggaagccugaugaggccguuaggccgaaaggacacg

SEQ ID NO: 12629 - RNA, 38 nt, Artificial Sequence
  Description of Artificial Sequence:  Enzymatic Nucleic Acid
gggcuuggcugaugaggccguuaggccgaaagcgagga

SEQ ID NO: 12630 - RNA, 38 nt, Artificial Sequence
  Description of Artificial Sequence:  Enzymatic Nucleic Acid
ugggcuugcugaugaggccguuaggccgaaaagcgagg

SEQ ID NO: 12631 - RNA, 38 nt, Artificial Sequence
  Description of Artificial Sequence:  Enzymatic Nucleic Acid
cggauagacugaugaggccguuaggccgaaaggugggc

SEQ ID NO: 12632 - RNA, 38 nt, Artificial Sequence
  Description of Artificial Sequence:  Enzymatic Nucleic Acid
agcggauacugaugaggccguuaggccgaaagaggugg

SEQ ID NO: 12633 - RNA, 38 nt, Artificial Sequence
  Description of Artificial Sequence:  Enzymatic Nucleic Acid
ccagcggacugaugaggccguuaggccgaaagagaggu

SEQ ID NO: 12634 - RNA, 38 nt, Artificial Sequence
  Description of Artificial Sequence:  Enzymatic Nucleic Acid
gcccagcgcugaugaggccguuaggccgaaauagagag

SEQ ID NO: 12635 - RNA, 38 nt, Artificial Sequence
  Description of Artificial Sequence:  Enzymatic Nucleic Acid
caagugagcugaugaggccguuaggccgaaacuugucu

SEQ ID NO: 12636 - RNA, 38 nt, Artificial Sequence
  Description of Artificial Sequence:  Enzymatic Nucleic Acid
gugcaagucugaugaggccguuaggccgaaaggacuug

SEQ ID NO: 12637 - RNA, 38 nt, Artificial Sequence
  Description of Artificial Sequence:  Enzymatic Nucleic Acid
cacggugccugaugaggccguuaggccgaaagugagga

SEQ ID NO: 12638 - RNA, 38 nt, Artificial Sequence
  Description of Artificial Sequence:  Enzymatic Nucleic Acid
ggaugccacugaugaggccguuaggccgaaacacggug

SEQ ID NO: 12639 - RNA, 38 nt, Artificial Sequence
  Description of Artificial Sequence:  Enzymatic Nucleic Acid
ggccgaggcugaugaggccguuaggccgaaaugccaua

SEQ ID NO: 12640 - RNA, 38 nt, Artificial Sequence
  Description of Artificial Sequence:  Enzymatic Nucleic Acid
uguuggcccugaugaggccguuaggccgaaagggaugc

SEQ ID NO: 12641 - RNA, 38 nt, Artificial Sequence
  Description of Artificial Sequence:  Enzymatic Nucleic Acid
agccacgucugaugaggccguuaggccgaaauuguugg

SEQ ID NO: 12642 - RNA, 38 nt, Artificial Sequence
  Description of Artificial Sequence:  Enzymatic Nucleic Acid
gggugccacugaugaggccguuaggccgaaagccacgu

SEQ ID NO: 12643 - RNA, 38 nt, Artificial Sequence
  Description of Artificial Sequence:  Enzymatic Nucleic Acid
auuguggucugaugaggccguuaggccgaaacaggggu

SEQ ID NO: 12644 - RNA, 38 nt, Artificial Sequence
  Description of Artificial Sequence:  Enzymatic Nucleic Acid
uuuggagucugaugaggccguuaggccgaaauuguggu

SEQ ID NO: 12645 - RNA, 38 nt, Artificial Sequence
  Description of Artificial Sequence:  Enzymatic Nucleic Acid
uuucuuugcugaugaggccguuaggccgaaagugauug

SEQ ID NO: 12646 - RNA, 38 nt, Artificial Sequence
  Description of Artificial Sequence:  Enzymatic Nucleic Acid
agaagucacugaugaggccguuaggccgaaaccuuucu

SEQ ID NO: 12647 - RNA, 38 nt, Artificial Sequence
  Description of Artificial Sequence:  Enzymatic Nucleic Acid
cagugcagcugaugaggccguuaggccgaaagucauac

SEQ ID NO: 12648 - RNA, 38 nt, Artificial Sequence
  Description of Artificial Sequence:  Enzymatic Nucleic Acid
ucagugcacugaugaggccguuaggccgaaaagucaua

SEQ ID NO: 12649 - RNA, 38 nt, Artificial Sequence
  Description of Artificial Sequence:  Enzymatic Nucleic Acid
ggauaaagcugaugaggccguuaggccgaaauucuuca

SEQ ID NO: 12650 - RNA, 38 nt, Artificial Sequence
  Description of Artificial Sequence:  Enzymatic Nucleic Acid
ccaggauacugaugaggccguuaggccgaaaggauucu

SEQ ID NO: 12651 - RNA, 38 nt, Artificial Sequence
  Description of Artificial Sequence:  Enzymatic Nucleic Acid
uccaggaucugaugaggccguuaggccgaaaaggauuc

SEQ ID NO: 12652 - RNA, 38 nt, Artificial Sequence
  Description of Artificial Sequence:  Enzymatic Nucleic Acid
auccaggacugaugaggccguuaggccgaaaaaggauu

SEQ ID NO: 12653 - RNA, 38 nt, Artificial Sequence
  Description of Artificial Sequence:  Enzymatic Nucleic Acid
ggauccagcugaugaggccguuaggccgaaauaaagga

SEQ ID NO: 12654 - RNA, 38 nt, Artificial Sequence
  Description of Artificial Sequence:  Enzymatic Nucleic Acid
gcugcuggcugaugaggccguuaggccgaaauccagga

SEQ ID NO: 12655 - RNA, 38 nt, Artificial Sequence
  Description of Artificial Sequence:  Enzymatic Nucleic Acid
uguuuccucugaugaggccguuaggccgaaaguugcug

SEQ ID NO: 12656 - RNA, 38 nt, Artificial Sequence
  Description of Artificial Sequence:  Enzymatic Nucleic Acid
cuguuucccugaugaggccguuaggccgaaaaguugcu

SEQ ID NO: 12657 - RNA, 38 nt, Artificial Sequence
  Description of Artificial Sequence:  Enzymatic Nucleic Acid
cgcugagacugaugaggccguuaggccgaaaugcucuc

SEQ ID NO: 12658 - RNA, 38 nt, Artificial Sequence
  Description of Artificial Sequence:  Enzymatic Nucleic Acid
ugcgcugacugaugaggccguuaggccgaaagaugcuc

SEQ ID NO: 12659 - RNA, 38 nt, Artificial Sequence
  Description of Artificial Sequence:  Enzymatic Nucleic Acid
caugcgcucugaugaggccguuaggccgaaagagaugc

SEQ ID NO: 12660 - RNA, 38 nt, Artificial Sequence
  Description of Artificial Sequence:  Enzymatic Nucleic Acid
ccuucuaucugaugaggccguuaggccgaaaccgucau

SEQ ID NO: 12661 - RNA, 38 nt, Artificial Sequence
  Description of Artificial Sequence:  Enzymatic Nucleic Acid
guuccuuccugaugaggccguuaggccgaaaugaccgu

SEQ ID NO: 12662 - RNA, 38 nt, Artificial Sequence
  Description of Artificial Sequence:  Enzymatic Nucleic Acid
aaccgucucugaugaggccguuaggccgaaauuuguuc

SEQ ID NO: 12663 - RNA, 38 nt, Artificial Sequence
  Description of Artificial Sequence:  Enzymatic Nucleic Acid
aaugugcucugaugaggccguuaggccgaaaccgucuu

SEQ ID NO: 12664 - RNA, 38 nt, Artificial Sequence
  Description of Artificial Sequence:  Enzymatic Nucleic Acid
caaugugccugaugaggccguuaggccgaaaaccgucu

SEQ ID NO: 12665 - RNA, 38 nt, Artificial Sequence
  Description of Artificial Sequence:  Enzymatic Nucleic Acid
ccaccacccugaugaggccguuaggccgaaaugugcua

SEQ ID NO: 12666 - RNA, 38 nt, Artificial Sequence
  Description of Artificial Sequence:  Enzymatic Nucleic Acid
gggucugacugaugaggccguuaggccgaaagucagcc

SEQ ID NO: 12667 - RNA, 38 nt, Artificial Sequence
  Description of Artificial Sequence:  Enzymatic Nucleic Acid
aggggucucugaugaggccguuaggccgaaagagucag

SEQ ID NO: 12668 - RNA, 38 nt, Artificial Sequence
  Description of Artificial Sequence:  Enzymatic Nucleic Acid
cagcuguacugaugaggccguuaggccgaaauuccagg

SEQ ID NO: 12669 - RNA, 38 nt, Artificial Sequence
  Description of Artificial Sequence:  Enzymatic Nucleic Acid
ggcagcugcugaugaggccguuaggccgaaagauucca

SEQ ID NO: 12670 - RNA, 38 nt, Artificial Sequence
  Description of Artificial Sequence:  Enzymatic Nucleic Acid
uuuuauugcugaugaggccguuaggccgaaaggcccgg

SEQ ID NO: 12671 - RNA, 38 nt, Artificial Sequence
  Description of Artificial Sequence:  Enzymatic Nucleic Acid
auuuuauucugaugaggccguuaggccgaaaaggcccg

SEQ ID NO: 12672 - RNA, 38 nt, Artificial Sequence
  Description of Artificial Sequence:  Enzymatic Nucleic Acid
cccuauuucugaugaggccguuaggccgaaauugaagg

SEQ ID NO: 12673 - RNA, 38 nt, Artificial Sequence
  Description of Artificial Sequence:  Enzymatic Nucleic Acid
acaguccccugaugaggccguuaggccgaaauuuuauu

SEQ ID NO: 12674 - RNA, 38 nt, Artificial Sequence
  Description of Artificial Sequence:  Enzymatic Nucleic Acid
uaaaauuucugaugaggccguuaggccgaaauguuucu

SEQ ID NO: 12675 - RNA, 38 nt, Artificial Sequence
  Description of Artificial Sequence:  Enzymatic Nucleic Acid
ugacauaacugaugaggccguuaggccgaaauuuuaug

SEQ ID NO: 12676 - RNA, 38 nt, Artificial Sequence
  Description of Artificial Sequence:  Enzymatic Nucleic Acid
gugacauacugaugaggccguuaggccgaaaauuuuau

SEQ ID NO: 12677 - RNA, 38 nt, Artificial Sequence
  Description of Artificial Sequence:  Enzymatic Nucleic Acid
ugugacaucugaugaggccguuaggccgaaaaauuuua

SEQ ID NO: 12678 - RNA, 38 nt, Artificial Sequence
  Description of Artificial Sequence:  Enzymatic Nucleic Acid
cugugacacugaugaggccguuaggccgaaaaaauuuu

SEQ ID NO: 12679 - RNA, 38 nt, Artificial Sequence
  Description of Artificial Sequence:  Enzymatic Nucleic Acid
acaucugucugaugaggccguuaggccgaaacauaaaa

SEQ ID NO: 12680 - RNA, 38 nt, Artificial Sequence
  Description of Artificial Sequence:  Enzymatic Nucleic Acid
aaacgugacugaugaggccguuaggccgaaagccauuc

SEQ ID NO: 12681 - RNA, 38 nt, Artificial Sequence
  Description of Artificial Sequence:  Enzymatic Nucleic Acid
gaaacgugcugaugaggccguuaggccgaaaagccauu

SEQ ID NO: 12682 - RNA, 38 nt, Artificial Sequence
  Description of Artificial Sequence:  Enzymatic Nucleic Acid
ggaaacgucugaugaggccguuaggccgaaaaagccau

SEQ ID NO: 12683 - RNA, 38 nt, Artificial Sequence
  Description of Artificial Sequence:  Enzymatic Nucleic Acid
uccaaggacugaugaggccguuaggccgaaacgugaaa

SEQ ID NO: 12684 - RNA, 38 nt, Artificial Sequence
  Description of Artificial Sequence:  Enzymatic Nucleic Acid
uuccaaggcugaugaggccguuaggccgaaaacgugaa

SEQ ID NO: 12685 - RNA, 38 nt, Artificial Sequence
  Description of Artificial Sequence:  Enzymatic Nucleic Acid
uuuccaagcugaugaggccguuaggccgaaaaacguga

SEQ ID NO: 12686 - RNA, 38 nt, Artificial Sequence
  Description of Artificial Sequence:  Enzymatic Nucleic Acid
ucuuuucccugaugaggccguuaggccgaaaggaaacg

SEQ ID NO: 12687 - RNA, 38 nt, Artificial Sequence
  Description of Artificial Sequence:  Enzymatic Nucleic Acid
ccacacagcugaugaggccguuaggccgaaacaguuuc

SEQ ID NO: 12688 - RNA, 38 nt, Artificial Sequence
  Description of Artificial Sequence:  Enzymatic Nucleic Acid
aauuuauucugaugaggccguuaggccgaaaccacaca

SEQ ID NO: 12689 - RNA, 38 nt, Artificial Sequence
  Description of Artificial Sequence:  Enzymatic Nucleic Acid
caggaauucugaugaggccguuaggccgaaauugacca

SEQ ID NO: 12690 - RNA, 38 nt, Artificial Sequence
  Description of Artificial Sequence:  Enzymatic Nucleic Acid
uguacaggcugaugaggccguuaggccgaaauuuauug

SEQ ID NO: 12691 - RNA, 38 nt, Artificial Sequence
  Description of Artificial Sequence:  Enzymatic Nucleic Acid
cuguacagcugaugaggccguuaggccgaaaauuuauu

SEQ ID NO: 12692 - RNA, 38 nt, Artificial Sequence
  Description of Artificial Sequence:  Enzymatic Nucleic Acid
ugucucugcugaugaggccguuaggccgaaacaggaau

SEQ ID NO: 12693 - RNA, 38 nt, Artificial Sequence
  Description of Artificial Sequence:  Enzymatic Nucleic Acid
auccaggucugaugaggccguuaggccgaaaugucucu

SEQ ID NO: 12694 - RNA, 38 nt, Artificial Sequence
  Description of Artificial Sequence:  Enzymatic Nucleic Acid
aauccaggcugaugaggccguuaggccgaaaaugucuc

SEQ ID NO: 12695 - RNA, 38 nt, Artificial Sequence
  Description of Artificial Sequence:  Enzymatic Nucleic Acid
cguagcagcugaugaggccguuaggccgaaauccaggu

SEQ ID NO: 12696 - RNA, 38 nt, Artificial Sequence
  Description of Artificial Sequence:  Enzymatic Nucleic Acid
ccguagcacugaugaggccguuaggccgaaaauccagg

SEQ ID NO: 12697 - RNA, 38 nt, Artificial Sequence
  Description of Artificial Sequence:  Enzymatic Nucleic Acid
acuguccgcugaugaggccguuaggccgaaagcagaau

SEQ ID NO: 12698 - RNA, 38 nt, Artificial Sequence
  Description of Artificial Sequence:  Enzymatic Nucleic Acid
cuguuguucugaugaggccguuaggccgaaacuguccg

SEQ ID NO: 12699 - RNA, 38 nt, Artificial Sequence
  Description of Artificial Sequence:  Enzymatic Nucleic Acid
ucuguugucugaugaggccguuaggccgaaaacugucc

SEQ ID NO: 12700 - RNA, 38 nt, Artificial Sequence
  Description of Artificial Sequence:  Enzymatic Nucleic Acid
gcugauaccugaugaggccguuaggccgaaauggugca

SEQ ID NO: 12701 - RNA, 38 nt, Artificial Sequence
  Description of Artificial Sequence:  Enzymatic Nucleic Acid
cuugcugacugaugaggccguuaggccgaaacuauggu

SEQ ID NO: 12702 - RNA, 38 nt, Artificial Sequence
  Description of Artificial Sequence:  Enzymatic Nucleic Acid
ugcuugcucugaugaggccguuaggccgaaauacuaug

SEQ ID NO: 12703 - RNA, 38 nt, Artificial Sequence
  Description of Artificial Sequence:  Enzymatic Nucleic Acid
guaaucuucugaugaggccguuaggccgaaaguggugg

SEQ ID NO: 12704 - RNA, 38 nt, Artificial Sequence
  Description of Artificial Sequence:  Enzymatic Nucleic Acid
gauggagucugaugaggccguuaggccgaaaucuugag

SEQ ID NO: 12705 - RNA, 38 nt, Artificial Sequence
  Description of Artificial Sequence:  Enzymatic Nucleic Acid
ugauggagcugaugaggccguuaggccgaaaaucuuga

SEQ ID NO: 12706 - RNA, 38 nt, Artificial Sequence
  Description of Artificial Sequence:  Enzymatic Nucleic Acid
gagugaugcugaugaggccguuaggccgaaaguaaucu

SEQ ID NO: 12707 - RNA, 38 nt, Artificial Sequence
  Description of Artificial Sequence:  Enzymatic Nucleic Acid
uucagagucugaugaggccguuaggccgaaauggagua

SEQ ID NO: 12708 - RNA, 38 nt, Artificial Sequence
  Description of Artificial Sequence:  Enzymatic Nucleic Acid
aagguucacugaugaggccguuaggccgaaagugaugg

SEQ ID NO: 12709 - RNA, 38 nt, Artificial Sequence
  Description of Artificial Sequence:  Enzymatic Nucleic Acid
uugaugaccugaugaggccguuaggccgaaagguucag

SEQ ID NO: 12710 - RNA, 38 nt, Artificial Sequence
  Description of Artificial Sequence:  Enzymatic Nucleic Acid
uucuugaucugaugaggccguuaggccgaaacaagguu

SEQ ID NO: 12711 - RNA, 38 nt, Artificial Sequence
  Description of Artificial Sequence:  Enzymatic Nucleic Acid
acguucuucugaugaggccguuaggccgaaaugacaag

SEQ ID NO: 12712 - RNA, 38 nt, Artificial Sequence
  Description of Artificial Sequence:  Enzymatic Nucleic Acid
cuucuagacugaugaggccguuaggccgaaacacguuc

SEQ ID NO: 12713 - RNA, 38 nt, Artificial Sequence
  Description of Artificial Sequence:  Enzymatic Nucleic Acid
gucuucuacugaugaggccguuaggccgaaagacacgu

SEQ ID NO: 12714 - RNA, 38 nt, Artificial Sequence
  Description of Artificial Sequence:  Enzymatic Nucleic Acid
gagucuuccugaugaggccguuaggccgaaagagacac

SEQ ID NO: 12715 - RNA, 38 nt, Artificial Sequence
  Description of Artificial Sequence:  Enzymatic Nucleic Acid
aggugccccugaugaggccguuaggccgaaagucuucu

SEQ ID NO: 12716 - RNA, 38 nt, Artificial Sequence
  Description of Artificial Sequence:  Enzymatic Nucleic Acid
ugcacgcacugaugaggccguuaggccgaaaggugccc

SEQ ID NO: 12717 - RNA, 38 nt, Artificial Sequence
  Description of Artificial Sequence:  Enzymatic Nucleic Acid
ccuguguacugaugaggccguuaggccgaaauguuccu

SEQ ID NO: 12718 - RNA, 38 nt, Artificial Sequence
  Description of Artificial Sequence:  Enzymatic Nucleic Acid
ccccugugcugaugaggccguuaggccgaaauauguuc

SEQ ID NO: 12719 - RNA, 38 nt, Artificial Sequence
  Description of Artificial Sequence:  Enzymatic Nucleic Acid
uuccgaagcugaugaggccguuaggccgaaaugucuuc

SEQ ID NO: 12720 - RNA, 38 nt, Artificial Sequence
  Description of Artificial Sequence:  Enzymatic Nucleic Acid
gucuuccgcugaugaggccguuaggccgaaaggauguc

SEQ ID NO: 12721 - RNA, 38 nt, Artificial Sequence
  Description of Artificial Sequence:  Enzymatic Nucleic Acid
ugucuucccugaugaggccguuaggccgaaaaggaugu

SEQ ID NO: 12722 - RNA, 38 nt, Artificial Sequence
  Description of Artificial Sequence:  Enzymatic Nucleic Acid
cuaacgagcugaugaggccguuaggccgaaacuucugu

SEQ ID NO: 12723 - RNA, 38 nt, Artificial Sequence
  Description of Artificial Sequence:  Enzymatic Nucleic Acid
ucuaacgacugaugaggccguuaggccgaaaacuucug

SEQ ID NO: 12724 - RNA, 38 nt, Artificial Sequence
  Description of Artificial Sequence:  Enzymatic Nucleic Acid
ucucuaaccugaugaggccguuaggccgaaagaacuuc

SEQ ID NO: 12725 - RNA, 38 nt, Artificial Sequence
  Description of Artificial Sequence:  Enzymatic Nucleic Acid
gaaucucucugaugaggccguuaggccgaaacgagaac

SEQ ID NO: 12726 - RNA, 38 nt, Artificial Sequence
  Description of Artificial Sequence:  Enzymatic Nucleic Acid
cgaaucuccugaugaggccguuaggccgaaaacgagaa

SEQ ID NO: 12727 - RNA, 38 nt, Artificial Sequence
  Description of Artificial Sequence:  Enzymatic Nucleic Acid
cgcuuccgcugaugaggccguuaggccgaaaucucuaa

SEQ ID NO: 12728 - RNA, 38 nt, Artificial Sequence
  Description of Artificial Sequence:  Enzymatic Nucleic Acid
gcgcuucccugaugaggccguuaggccgaaaaucucua

SEQ ID NO: 12729 - RNA, 38 nt, Artificial Sequence
  Description of Artificial Sequence:  Enzymatic Nucleic Acid
agguuuugcugaugaggccguuaggccgaaagcaggug

SEQ ID NO: 12730 - RNA, 38 nt, Artificial Sequence
  Description of Artificial Sequence:  Enzymatic Nucleic Acid
gagguuuucugaugaggccguuaggccgaaaagcaggu

SEQ ID NO: 12731 - RNA, 38 nt, Artificial Sequence
  Description of Artificial Sequence:  Enzymatic Nucleic Acid
uagucacucugaugaggccguuaggccgaaagguuuug

SEQ ID NO: 12732 - RNA, 38 nt, Artificial Sequence
  Description of Artificial Sequence:  Enzymatic Nucleic Acid
agaccucgcugaugaggccguuaggccgaaagucacug

SEQ ID NO: 12733 - RNA, 38 nt, Artificial Sequence
  Description of Artificial Sequence:  Enzymatic Nucleic Acid
cugauggacugaugaggccguuaggccgaaaccucgua

SEQ ID NO: 12734 - RNA, 38 nt, Artificial Sequence
  Description of Artificial Sequence:  Enzymatic Nucleic Acid
cacugaugcugaugaggccguuaggccgaaagaccucg

SEQ ID NO: 12735 - RNA, 38 nt, Artificial Sequence
  Description of Artificial Sequence:  Enzymatic Nucleic Acid
gagccacucugaugaggccguuaggccgaaauggagac

SEQ ID NO: 12736 - RNA, 38 nt, Artificial Sequence
  Description of Artificial Sequence:  Enzymatic Nucleic Acid
aggucguacugaugaggccguuaggccgaaagccacug

SEQ ID NO: 12737 - RNA, 38 nt, Artificial Sequence
  Description of Artificial Sequence:  Enzymatic Nucleic Acid
uaaggucgcugaugaggccguuaggccgaaagagccac

SEQ ID NO: 12738 - RNA, 38 nt, Artificial Sequence
  Description of Artificial Sequence:  Enzymatic Nucleic Acid
gacagucucugaugaggccguuaggccgaaaggucgua

SEQ ID NO: 12739 - RNA, 38 nt, Artificial Sequence
  Description of Artificial Sequence:  Enzymatic Nucleic Acid
ugacaguccugaugaggccguuaggccgaaaaggucgu

SEQ ID NO: 12740 - RNA, 38 nt, Artificial Sequence
  Description of Artificial Sequence:  Enzymatic Nucleic Acid
ucuagcuucugaugaggccguuaggccgaaacagucua

SEQ ID NO: 12741 - RNA, 38 nt, Artificial Sequence
  Description of Artificial Sequence:  Enzymatic Nucleic Acid
gacaccuccugaugaggccguuaggccgaaagcuugac

SEQ ID NO: 12742 - RNA, 38 nt, Artificial Sequence
  Description of Artificial Sequence:  Enzymatic Nucleic Acid
ggcgcgggcugaugaggccguuaggccgaaacaccucu

SEQ ID NO: 12743 - RNA, 38 nt, Artificial Sequence
  Description of Artificial Sequence:  Enzymatic Nucleic Acid
agugaucucugaugaggccguuaggccgaaaggcgcgg

SEQ ID NO: 12744 - RNA, 38 nt, Artificial Sequence
  Description of Artificial Sequence:  Enzymatic Nucleic Acid
uuugaacccugaugaggccguuaggccgaaagugaucu

SEQ ID NO: 12745 - RNA, 38 nt, Artificial Sequence
  Description of Artificial Sequence:  Enzymatic Nucleic Acid
uguuuuugcugaugaggccguuaggccgaaaccaagug

SEQ ID NO: 12746 - RNA, 38 nt, Artificial Sequence
  Description of Artificial Sequence:  Enzymatic Nucleic Acid
ccuaaaaucugaugaggccguuaggccgaaauucccgg

SEQ ID NO: 12747 - RNA, 38 nt, Artificial Sequence
  Description of Artificial Sequence:  Enzymatic Nucleic Acid
uccuaaaacugaugaggccguuaggccgaaaauucccg

SEQ ID NO: 12748 - RNA, 38 nt, Artificial Sequence
  Description of Artificial Sequence:  Enzymatic Nucleic Acid
uccucugucugaugaggccguuaggccgaaacucuuuc

SEQ ID NO: 12749 - RNA, 38 nt, Artificial Sequence
  Description of Artificial Sequence:  Enzymatic Nucleic Acid
caccuauacugaugaggccguuaggccgaaacacccuc

SEQ ID NO: 12750 - RNA, 38 nt, Artificial Sequence
  Description of Artificial Sequence:  Enzymatic Nucleic Acid
ggcaccuacugaugaggccguuaggccgaaagacaccc

SEQ ID NO: 12751 - RNA, 38 nt, Artificial Sequence
  Description of Artificial Sequence:  Enzymatic Nucleic Acid
ucggcacccugaugaggccguuaggccgaaauagacac

SEQ ID NO: 12752 - RNA, 38 nt, Artificial Sequence
  Description of Artificial Sequence:  Enzymatic Nucleic Acid
cggugaggcugaugaggccguuaggccgaaaggcugcg

SEQ ID NO: 12753 - RNA, 38 nt, Artificial Sequence
  Description of Artificial Sequence:  Enzymatic Nucleic Acid
ugcacggucugaugaggccguuaggccgaaagguaggc

SEQ ID NO: 12754 - RNA, 38 nt, Artificial Sequence
  Description of Artificial Sequence:  Enzymatic Nucleic Acid
acuugucucugaugaggccguuaggccgaaagguuccu

SEQ ID NO: 12755 - RNA, 38 nt, Artificial Sequence
  Description of Artificial Sequence:  Enzymatic Nucleic Acid
ccagguuucugaugaggccguuaggccgaaacuugucu

SEQ ID NO: 12756 - RNA, 38 nt, Artificial Sequence
  Description of Artificial Sequence:  Enzymatic Nucleic Acid
gugagcgucugaugaggccguuaggccgaaaucagcuc

SEQ ID NO: 12757 - RNA, 38 nt, Artificial Sequence
  Description of Artificial Sequence:  Enzymatic Nucleic Acid
gugcacgucugaugaggccguuaggccgaaagcgugau

SEQ ID NO: 12758 - RNA, 38 nt, Artificial Sequence
  Description of Artificial Sequence:  Enzymatic Nucleic Acid
agccaaaacugaugaggccguuaggccgaaagggucgc

SEQ ID NO: 12759 - RNA, 38 nt, Artificial Sequence
  Description of Artificial Sequence:  Enzymatic Nucleic Acid
ggagccaacugaugaggccguuaggccgaaagaggguc

SEQ ID NO: 12760 - RNA, 38 nt, Artificial Sequence
  Description of Artificial Sequence:  Enzymatic Nucleic Acid
aggagccacugaugaggccguuaggccgaaaagagggu

SEQ ID NO: 12761 - RNA, 38 nt, Artificial Sequence
  Description of Artificial Sequence:  Enzymatic Nucleic Acid
aaggagcccugaugaggccguuaggccgaaaaagaggg

SEQ ID NO: 12762 - RNA, 38 nt, Artificial Sequence
  Description of Artificial Sequence:  Enzymatic Nucleic Acid
guuagaagcugaugaggccguuaggccgaaagccaaaa

SEQ ID NO: 12763 - RNA, 38 nt, Artificial Sequence
  Description of Artificial Sequence:  Enzymatic Nucleic Acid
agaguuagcugaugaggccguuaggccgaaaggagcca

SEQ ID NO: 12764 - RNA, 38 nt, Artificial Sequence
  Description of Artificial Sequence:  Enzymatic Nucleic Acid
gagaguuacugaugaggccguuaggccgaaaaggagcc

SEQ ID NO: 12765 - RNA, 38 nt, Artificial Sequence
  Description of Artificial Sequence:  Enzymatic Nucleic Acid
aagagagucugaugaggccguuaggccgaaagaaggag

SEQ ID NO: 12766 - RNA, 38 nt, Artificial Sequence
  Description of Artificial Sequence:  Enzymatic Nucleic Acid
gaugaagacugaugaggccguuaggccgaaaguuagaa

SEQ ID NO: 12767 - RNA, 38 nt, Artificial Sequence
  Description of Artificial Sequence:  Enzymatic Nucleic Acid
cugaugaacugaugaggccguuaggccgaaagaguuag

SEQ ID NO: 12768 - RNA, 38 nt, Artificial Sequence
  Description of Artificial Sequence:  Enzymatic Nucleic Acid
uucugaugcugaugaggccguuaggccgaaagagaguu

SEQ ID NO: 12769 - RNA, 38 nt, Artificial Sequence
  Description of Artificial Sequence:  Enzymatic Nucleic Acid
uuucugaucugaugaggccguuaggccgaaaagagagu

SEQ ID NO: 12770 - RNA, 38 nt, Artificial Sequence
  Description of Artificial Sequence:  Enzymatic Nucleic Acid
aguuuucucugaugaggccguuaggccgaaaugaagag

SEQ ID NO: 12771 - RNA, 38 nt, Artificial Sequence
  Description of Artificial Sequence:  Enzymatic Nucleic Acid
cggaagaacugaugaggccguuaggccgaaaccgcuuc

SEQ ID NO: 12772 - RNA, 38 nt, Artificial Sequence
  Description of Artificial Sequence:  Enzymatic Nucleic Acid
uucggaagcugaugaggccguuaggccgaaagaccgcu

SEQ ID NO: 12773 - RNA, 38 nt, Artificial Sequence
  Description of Artificial Sequence:  Enzymatic Nucleic Acid
cuucggaacugaugaggccguuaggccgaaaagaccgc

SEQ ID NO: 12774 - RNA, 38 nt, Artificial Sequence
  Description of Artificial Sequence:  Enzymatic Nucleic Acid
uacuucggcugaugaggccguuaggccgaaagaagacc

SEQ ID NO: 12775 - RNA, 38 nt, Artificial Sequence
  Description of Artificial Sequence:  Enzymatic Nucleic Acid
uuacuucgcugaugaggccguuaggccgaaaagaagac

SEQ ID NO: 12776 - RNA, 38 nt, Artificial Sequence
  Description of Artificial Sequence:  Enzymatic Nucleic Acid
ucugucuucugaugaggccguuaggccgaaacuucgga

SEQ ID NO: 12777 - RNA, 38 nt, Artificial Sequence
  Description of Artificial Sequence:  Enzymatic Nucleic Acid
uugacaggcugaugaggccguuaggccgaaagucuguc

SEQ ID NO: 12778 - RNA, 38 nt, Artificial Sequence
  Description of Artificial Sequence:  Enzymatic Nucleic Acid
uaaugauucugaugaggccguuaggccgaaacagguag

SEQ ID NO: 12779 - RNA, 38 nt, Artificial Sequence
  Description of Artificial Sequence:  Enzymatic Nucleic Acid
uccauaaucugaugaggccguuaggccgaaauugacag

SEQ ID NO: 12780 - RNA, 38 nt, Artificial Sequence
  Description of Artificial Sequence:  Enzymatic Nucleic Acid
ggguccaucugaugaggccguuaggccgaaaugauuga

SEQ ID NO: 12781 - RNA, 38 nt, Artificial Sequence
  Description of Artificial Sequence:  Enzymatic Nucleic Acid
uggguccacugaugaggccguuaggccgaaaaugauug

SEQ ID NO: 12782 - RNA, 38 nt, Artificial Sequence
  Description of Artificial Sequence:  Enzymatic Nucleic Acid
uccaggggcugaugaggccguuaggccgaaacuucauc

SEQ ID NO: 12783 - RNA, 38 nt, Artificial Sequence
  Description of Artificial Sequence:  Enzymatic Nucleic Acid
auccagggcugaugaggccguuaggccgaaaacuucau

SEQ ID NO: 12784 - RNA, 38 nt, Artificial Sequence
  Description of Artificial Sequence:  Enzymatic Nucleic Acid
uggcaucacugaugaggccguuaggccgaaagggcagc

SEQ ID NO: 12785 - RNA, 38 nt, Artificial Sequence
  Description of Artificial Sequence:  Enzymatic Nucleic Acid
cccgugcacugaugaggccguuaggccgaaacucccac

SEQ ID NO: 12786 - RNA, 38 nt, Artificial Sequence
  Description of Artificial Sequence:  Enzymatic Nucleic Acid
ucccgugccugaugaggccguuaggccgaaaacuccca

SEQ ID NO: 12787 - RNA, 38 nt, Artificial Sequence
  Description of Artificial Sequence:  Enzymatic Nucleic Acid
gauuugcccugaugaggccguuaggccgaaaguuucag

SEQ ID NO: 12788 - RNA, 38 nt, Artificial Sequence
  Description of Artificial Sequence:  Enzymatic Nucleic Acid
uuccgagccugaugaggccguuaggccgaaauuugccu

SEQ ID NO: 12789 - RNA, 38 nt, Artificial Sequence
  Description of Artificial Sequence:  Enzymatic Nucleic Acid
ccucuucccugaugaggccguuaggccgaaagcgauuu

SEQ ID NO: 12790 - RNA, 38 nt, Artificial Sequence
  Description of Artificial Sequence:  Enzymatic Nucleic Acid
uuucccaacugaugaggccguuaggccgaaagccccuc

SEQ ID NO: 12791 - RNA, 38 nt, Artificial Sequence
  Description of Artificial Sequence:  Enzymatic Nucleic Acid
cuuucccacugaugaggccguuaggccgaaaagccccu

SEQ ID NO: 12792 - RNA, 38 nt, Artificial Sequence
  Description of Artificial Sequence:  Enzymatic Nucleic Acid
acuuuccccugaugaggccguuaggccgaaaaagcccc

SEQ ID NO: 12793 - RNA, 38 nt, Artificial Sequence
  Description of Artificial Sequence:  Enzymatic Nucleic Acid
gcuugaaccugaugaggccguuaggccgaaacuuuccc

SEQ ID NO: 12794 - RNA, 38 nt, Artificial Sequence
  Description of Artificial Sequence:  Enzymatic Nucleic Acid
gaggcuugcugaugaggccguuaggccgaaacgacuuu

SEQ ID NO: 12795 - RNA, 38 nt, Artificial Sequence
  Description of Artificial Sequence:  Enzymatic Nucleic Acid
agaggcuucugaugaggccguuaggccgaaaacgacuu

SEQ ID NO: 12796 - RNA, 38 nt, Artificial Sequence
  Description of Artificial Sequence:  Enzymatic Nucleic Acid
caaaugcacugaugaggccguuaggccgaaaggcuuga

SEQ ID NO: 12797 - RNA, 38 nt, Artificial Sequence
  Description of Artificial Sequence:  Enzymatic Nucleic Acid
uaaugccacugaugaggccguuaggccgaaaugcagag

SEQ ID NO: 12798 - RNA, 38 nt, Artificial Sequence
  Description of Artificial Sequence:  Enzymatic Nucleic Acid
uuaaugcccugaugaggccguuaggccgaaaaugcaga

SEQ ID NO: 12799 - RNA, 38 nt, Artificial Sequence
  Description of Artificial Sequence:  Enzymatic Nucleic Acid
aggugggucugaugaggccguuaggccgaaauuucuua

SEQ ID NO: 12800 - RNA, 38 nt, Artificial Sequence
  Description of Artificial Sequence:  Enzymatic Nucleic Acid
ccucuuuccugaugaggccguuaggccgaaacaucuuc

SEQ ID NO: 12801 - RNA, 38 nt, Artificial Sequence
  Description of Artificial Sequence:  Enzymatic Nucleic Acid
gagcuuugcugaugaggccguuaggccgaaacucacug

SEQ ID NO: 12802 - RNA, 38 nt, Artificial Sequence
  Description of Artificial Sequence:  Enzymatic Nucleic Acid
ggucaucacugaugaggccguuaggccgaaagcuuugu

SEQ ID NO: 12803 - RNA, 38 nt, Artificial Sequence
  Description of Artificial Sequence:  Enzymatic Nucleic Acid
aagaucuucugaugaggccguuaggccgaaaguucggu

SEQ ID NO: 12804 - RNA, 38 nt, Artificial Sequence
  Description of Artificial Sequence:  Enzymatic Nucleic Acid
ugggucaacugaugaggccguuaggccgaaaucuugag

SEQ ID NO: 12805 - RNA, 38 nt, Artificial Sequence
  Description of Artificial Sequence:  Enzymatic Nucleic Acid
uguggguccugaugaggccguuaggccgaaagaucuug

SEQ ID NO: 12806 - RNA, 38 nt, Artificial Sequence
  Description of Artificial Sequence:  Enzymatic Nucleic Acid
ugauggcccugaugaggccguuaggccgaaaugugggu

SEQ ID NO: 12807 - RNA, 38 nt, Artificial Sequence
  Description of Artificial Sequence:  Enzymatic Nucleic Acid
auucagaucugaugaggccguuaggccgaaauggccga

SEQ ID NO: 12808 - RNA, 38 nt, Artificial Sequence
  Description of Artificial Sequence:  Enzymatic Nucleic Acid
cacauucacugaugaggccguuaggccgaaaugauggc

SEQ ID NO: 12809 - RNA, 38 nt, Artificial Sequence
  Description of Artificial Sequence:  Enzymatic Nucleic Acid
aggagguucugaugaggccguuaggccgaaaccacauu

SEQ ID NO: 12810 - RNA, 38 nt, Artificial Sequence
  Description of Artificial Sequence:  Enzymatic Nucleic Acid
caggaggucugaugaggccguuaggccgaaaaccacau

SEQ ID NO: 12811 - RNA, 38 nt, Artificial Sequence
  Description of Artificial Sequence:  Enzymatic Nucleic Acid
gcucccagcugaugaggccguuaggccgaaagguuaac

SEQ ID NO: 12812 - RNA, 38 nt, Artificial Sequence
  Description of Artificial Sequence:  Enzymatic Nucleic Acid
uauuccaccugaugaggccguuaggccgaaaucaccau

SEQ ID NO: 12813 - RNA, 38 nt, Artificial Sequence
  Description of Artificial Sequence:  Enzymatic Nucleic Acid
auuugcagcugaugaggccguuaggccgaaauuccacg

SEQ ID NO: 12814 - RNA, 38 nt, Artificial Sequence
  Description of Artificial Sequence:  Enzymatic Nucleic Acid
gguuuccgcugaugaggccguuaggccgaaauuugcag

SEQ ID NO: 12815 - RNA, 38 nt, Artificial Sequence
  Description of Artificial Sequence:  Enzymatic Nucleic Acid
gguaguugcugaugaggccguuaggccgaaacagguuu

SEQ ID NO: 12816 - RNA, 38 nt, Artificial Sequence
  Description of Artificial Sequence:  Enzymatic Nucleic Acid
ucuugaggcugaugaggccguuaggccgaaaguuggac

SEQ ID NO: 12817 - RNA, 38 nt, Artificial Sequence
  Description of Artificial Sequence:  Enzymatic Nucleic Acid
gacagaaucugaugaggccguuaggccgaaagucacgu

SEQ ID NO: 12818 - RNA, 38 nt, Artificial Sequence
  Description of Artificial Sequence:  Enzymatic Nucleic Acid
agacagaacugaugaggccguuaggccgaaaagucacg

SEQ ID NO: 12819 - RNA, 38 nt, Artificial Sequence
  Description of Artificial Sequence:  Enzymatic Nucleic Acid
ugagacagcugaugaggccguuaggccgaaauaaguca

SEQ ID NO: 12820 - RNA, 38 nt, Artificial Sequence
  Description of Artificial Sequence:  Enzymatic Nucleic Acid
uugagacacugaugaggccguuaggccgaaaauaaguc

SEQ ID NO: 12821 - RNA, 38 nt, Artificial Sequence
  Description of Artificial Sequence:  Enzymatic Nucleic Acid
cuuguugacugaugaggccguuaggccgaaacagaaua

SEQ ID NO: 12822 - RNA, 38 nt, Artificial Sequence
  Description of Artificial Sequence:  Enzymatic Nucleic Acid
uccuuguucugaugaggccguuaggccgaaagacagaa

SEQ ID NO: 12823 - RNA, 38 nt, Artificial Sequence
  Description of Artificial Sequence:  Enzymatic Nucleic Acid
ccauaugccugaugaggccguuaggccgaaaggcugcg

SEQ ID NO: 12824 - RNA, 38 nt, Artificial Sequence
  Description of Artificial Sequence:  Enzymatic Nucleic Acid
gagcuccacugaugaggccguuaggccgaaaugcaagg

SEQ ID NO: 12825 - RNA, 38 nt, Artificial Sequence
  Description of Artificial Sequence:  Enzymatic Nucleic Acid
ucuuucuucugaugaggccguuaggccgaaagcuccau

SEQ ID NO: 12826 - RNA, 38 nt, Artificial Sequence
  Description of Artificial Sequence:  Enzymatic Nucleic Acid
acacuguccugaugaggccguuaggccgaaaggcgggg

SEQ ID NO: 12827 - RNA, 38 nt, Artificial Sequence
  Description of Artificial Sequence:  Enzymatic Nucleic Acid
gagcugcucugaugaggccguuaggccgaaacacuguc

SEQ ID NO: 12828 - RNA, 38 nt, Artificial Sequence
  Description of Artificial Sequence:  Enzymatic Nucleic Acid
ugacacuucugaugaggccguuaggccgaaagcugcug

SEQ ID NO: 12829 - RNA, 38 nt, Artificial Sequence
  Description of Artificial Sequence:  Enzymatic Nucleic Acid
gagcuggucugaugaggccguuaggccgaaacacuuga

SEQ ID NO: 12830 - RNA, 38 nt, Artificial Sequence
  Description of Artificial Sequence:  Enzymatic Nucleic Acid
ggaagcugcugaugaggccguuaggccgaaagcuggug

SEQ ID NO: 12831 - RNA, 38 nt, Artificial Sequence
  Description of Artificial Sequence:  Enzymatic Nucleic Acid
cuucagggcugaugaggccguuaggccgaaagcuggag

SEQ ID NO: 12832 - RNA, 38 nt, Artificial Sequence
  Description of Artificial Sequence:  Enzymatic Nucleic Acid
ucuucaggcugaugaggccguuaggccgaaaagcugga

SEQ ID NO: 12833 - RNA, 38 nt, Artificial Sequence
  Description of Artificial Sequence:  Enzymatic Nucleic Acid
cucacugucugaugaggccguuaggccgaaauccucgu

SEQ ID NO: 12834 - RNA, 38 nt, Artificial Sequence
  Description of Artificial Sequence:  Enzymatic Nucleic Acid
ucucacugcugaugaggccguuaggccgaaaauccucg

SEQ ID NO: 12835 - RNA, 38 nt, Artificial Sequence
  Description of Artificial Sequence:  Enzymatic Nucleic Acid
ugcuuggacugaugaggccguuaggccgaaaucucacu

SEQ ID NO: 12836 - RNA, 38 nt, Artificial Sequence
  Description of Artificial Sequence:  Enzymatic Nucleic Acid
gcugcuugcugaugaggccguuaggccgaaagaucuca

SEQ ID NO: 12837 - RNA, 38 nt, Artificial Sequence
  Description of Artificial Sequence:  Enzymatic Nucleic Acid
uccauggucugaugaggccguuaggccgaaaggggcug

SEQ ID NO: 12838 - RNA, 38 nt, Artificial Sequence
  Description of Artificial Sequence:  Enzymatic Nucleic Acid
cuguaggacugaugaggccguuaggccgaaaucagguc

SEQ ID NO: 12839 - RNA, 38 nt, Artificial Sequence
  Description of Artificial Sequence:  Enzymatic Nucleic Acid
acuguaggcugaugaggccguuaggccgaaaaucaggu

SEQ ID NO: 12840 - RNA, 38 nt, Artificial Sequence
  Description of Artificial Sequence:  Enzymatic Nucleic Acid
aacuguagcugaugaggccguuaggccgaaaaaucagg

SEQ ID NO: 12841 - RNA, 38 nt, Artificial Sequence
  Description of Artificial Sequence:  Enzymatic Nucleic Acid
ggaaacugcugaugaggccguuaggccgaaaggaaauc

SEQ ID NO: 12842 - RNA, 38 nt, Artificial Sequence
  Description of Artificial Sequence:  Enzymatic Nucleic Acid
cacuuggacugaugaggccguuaggccgaaacuguagg

SEQ ID NO: 12843 - RNA, 38 nt, Artificial Sequence
  Description of Artificial Sequence:  Enzymatic Nucleic Acid
ccacuuggcugaugaggccguuaggccgaaaacuguag

SEQ ID NO: 12844 - RNA, 38 nt, Artificial Sequence
  Description of Artificial Sequence:  Enzymatic Nucleic Acid
aggacagacugaugaggccguuaggccgaaacuccaug

SEQ ID NO: 12845 - RNA, 38 nt, Artificial Sequence
  Description of Artificial Sequence:  Enzymatic Nucleic Acid
gaggacagcugaugaggccguuaggccgaaaacuccau

SEQ ID NO: 12846 - RNA, 38 nt, Artificial Sequence
  Description of Artificial Sequence:  Enzymatic Nucleic Acid
ggaggacacugaugaggccguuaggccgaaaaacucca

SEQ ID NO: 12847 - RNA, 38 nt, Artificial Sequence
  Description of Artificial Sequence:  Enzymatic Nucleic Acid
uucuggagcugaugaggccguuaggccgaaacagaaac

SEQ ID NO: 12848 - RNA, 38 nt, Artificial Sequence
  Description of Artificial Sequence:  Enzymatic Nucleic Acid
acuuucugcugaugaggccguuaggccgaaaggacaga

SEQ ID NO: 12849 - RNA, 38 nt, Artificial Sequence
  Description of Artificial Sequence:  Enzymatic Nucleic Acid
ucagauaacugaugaggccguuaggccgaaaggauguu

SEQ ID NO: 12850 - RNA, 38 nt, Artificial Sequence
  Description of Artificial Sequence:  Enzymatic Nucleic Acid
cucagauacugaugaggccguuaggccgaaaaggaugu

SEQ ID NO: 12851 - RNA, 38 nt, Artificial Sequence
  Description of Artificial Sequence:  Enzymatic Nucleic Acid
ucucagaucugaugaggccguuaggccgaaaaaggaug

SEQ ID NO: 12852 - RNA, 38 nt, Artificial Sequence
  Description of Artificial Sequence:  Enzymatic Nucleic Acid
uucucagacugaugaggccguuaggccgaaaaaaggau

SEQ ID NO: 12853 - RNA, 38 nt, Artificial Sequence
  Description of Artificial Sequence:  Enzymatic Nucleic Acid
uguucucacugaugaggccguuaggccgaaauaaaagg

SEQ ID NO: 12854 - RNA, 38 nt, Artificial Sequence
  Description of Artificial Sequence:  Enzymatic Nucleic Acid
aagucgcacugaugaggccguuaggccgaaaucuucac

SEQ ID NO: 12855 - RNA, 38 nt, Artificial Sequence
  Description of Artificial Sequence:  Enzymatic Nucleic Acid
aaagucgccugaugaggccguuaggccgaaaaucuuca

SEQ ID NO: 12856 - RNA, 38 nt, Artificial Sequence
  Description of Artificial Sequence:  Enzymatic Nucleic Acid
ccaggccacugaugaggccguuaggccgaaagucgcaa

SEQ ID NO: 12857 - RNA, 38 nt, Artificial Sequence
  Description of Artificial Sequence:  Enzymatic Nucleic Acid
gccaggcccugaugaggccguuaggccgaaaagucgca

SEQ ID NO: 12858 - RNA, 38 nt, Artificial Sequence
  Description of Artificial Sequence:  Enzymatic Nucleic Acid
aggguucucugaugaggccguuaggccgaaauaaauau

SEQ ID NO: 12859 - RNA, 38 nt, Artificial Sequence
  Description of Artificial Sequence:  Enzymatic Nucleic Acid
ccucacaucugaugaggccguuaggccgaaaucagggu

SEQ ID NO: 12860 - RNA, 38 nt, Artificial Sequence
  Description of Artificial Sequence:  Enzymatic Nucleic Acid
uccucacacugaugaggccguuaggccgaaaaucaggg

SEQ ID NO: 12861 - RNA, 38 nt, Artificial Sequence
  Description of Artificial Sequence:  Enzymatic Nucleic Acid
aagucgagcugaugaggccguuaggccgaaaucuccuc

SEQ ID NO: 12862 - RNA, 38 nt, Artificial Sequence
  Description of Artificial Sequence:  Enzymatic Nucleic Acid
gggaaguccugaugaggccguuaggccgaaaguaucuc

SEQ ID NO: 12863 - RNA, 38 nt, Artificial Sequence
  Description of Artificial Sequence:  Enzymatic Nucleic Acid
uuuaggggcugaugaggccguuaggccgaaagucgagu

SEQ ID NO: 12864 - RNA, 38 nt, Artificial Sequence
  Description of Artificial Sequence:  Enzymatic Nucleic Acid
uuuuagggcugaugaggccguuaggccgaaaagucgag

SEQ ID NO: 12865 - RNA, 38 nt, Artificial Sequence
  Description of Artificial Sequence:  Enzymatic Nucleic Acid
auccauuucugaugaggccguuaggccgaaaggggaag

SEQ ID NO: 12866 - RNA, 38 nt, Artificial Sequence
  Description of Artificial Sequence:  Enzymatic Nucleic Acid
ggauucagcugaugaggccguuaggccgaaagccaucc

SEQ ID NO: 12867 - RNA, 38 nt, Artificial Sequence
  Description of Artificial Sequence:  Enzymatic Nucleic Acid
caaagaugcugaugaggccguuaggccgaaauucagga

SEQ ID NO: 12868 - RNA, 38 nt, Artificial Sequence
  Description of Artificial Sequence:  Enzymatic Nucleic Acid
uugucaaacugaugaggccguuaggccgaaauggauuc

SEQ ID NO: 12869 - RNA, 38 nt, Artificial Sequence
  Description of Artificial Sequence:  Enzymatic Nucleic Acid
ccuugucacugaugaggccguuaggccgaaagauggau

SEQ ID NO: 12870 - RNA, 38 nt, Artificial Sequence
  Description of Artificial Sequence:  Enzymatic Nucleic Acid
accuuguccugaugaggccguuaggccgaaaagaugga

SEQ ID NO: 12871 - RNA, 38 nt, Artificial Sequence
  Description of Artificial Sequence:  Enzymatic Nucleic Acid
gugcuguacugaugaggccguuaggccgaaaccuuguc

SEQ ID NO: 12872 - RNA, 38 nt, Artificial Sequence
  Description of Artificial Sequence:  Enzymatic Nucleic Acid
uggugcugcugaugaggccguuaggccgaaagaccuug

SEQ ID NO: 12873 - RNA, 38 nt, Artificial Sequence
  Description of Artificial Sequence:  Enzymatic Nucleic Acid
cgccauagcugaugaggccguuaggccgaaaccacaca

SEQ ID NO: 12874 - RNA, 38 nt, Artificial Sequence
  Description of Artificial Sequence:  Enzymatic Nucleic Acid
acacgccacugaugaggccguuaggccgaaaggaccac

SEQ ID NO: 12875 - RNA, 38 nt, Artificial Sequence
  Description of Artificial Sequence:  Enzymatic Nucleic Acid
cccacagccugaugaggccguuaggccgaaacacgcca

SEQ ID NO: 12876 - RNA, 38 nt, Artificial Sequence
  Description of Artificial Sequence:  Enzymatic Nucleic Acid
aaggagaacugaugaggccguuaggccgaaaucuccca

SEQ ID NO: 12877 - RNA, 38 nt, Artificial Sequence
  Description of Artificial Sequence:  Enzymatic Nucleic Acid
cuaaggagcugaugaggccguuaggccgaaagaucucc

SEQ ID NO: 12878 - RNA, 38 nt, Artificial Sequence
  Description of Artificial Sequence:  Enzymatic Nucleic Acid
ccuaaggacugaugaggccguuaggccgaaaagaucuc

SEQ ID NO: 12879 - RNA, 38 nt, Artificial Sequence
  Description of Artificial Sequence:  Enzymatic Nucleic Acid
ccccuaagcugaugaggccguuaggccgaaagaagauc

SEQ ID NO: 12880 - RNA, 38 nt, Artificial Sequence
  Description of Artificial Sequence:  Enzymatic Nucleic Acid
aacccccucugaugaggccguuaggccgaaaggagaag

SEQ ID NO: 12881 - RNA, 38 nt, Artificial Sequence
  Description of Artificial Sequence:  Enzymatic Nucleic Acid
gaaccccccugaugaggccguuaggccgaaaaggagaa

SEQ ID NO: 12882 - RNA, 38 nt, Artificial Sequence
  Description of Artificial Sequence:  Enzymatic Nucleic Acid
guauggagcugaugaggccguuaggccgaaacccccua

SEQ ID NO: 12883 - RNA, 38 nt, Artificial Sequence
  Description of Artificial Sequence:  Enzymatic Nucleic Acid
gguauggacugaugaggccguuaggccgaaaacccccu

SEQ ID NO: 12884 - RNA, 38 nt, Artificial Sequence
  Description of Artificial Sequence:  Enzymatic Nucleic Acid
uggguaugcugaugaggccguuaggccgaaagaacccc

SEQ ID NO: 12885 - RNA, 38 nt, Artificial Sequence
  Description of Artificial Sequence:  Enzymatic Nucleic Acid
cuccugggcugaugaggccguuaggccgaaauggagaa

SEQ ID NO: 12886 - RNA, 38 nt, Artificial Sequence
  Description of Artificial Sequence:  Enzymatic Nucleic Acid
ggcugcagcugaugaggccguuaggccgaaagucuuca

SEQ ID NO: 12887 - RNA, 38 nt, Artificial Sequence
  Description of Artificial Sequence:  Enzymatic Nucleic Acid
cggcugcacugaugaggccguuaggccgaaaagucuuc

SEQ ID NO: 12888 - RNA, 38 nt, Artificial Sequence
  Description of Artificial Sequence:  Enzymatic Nucleic Acid
guguggcacugaugaggccguuaggccgaaacuccggg

SEQ ID NO: 12889 - RNA, 38 nt, Artificial Sequence
  Description of Artificial Sequence:  Enzymatic Nucleic Acid
auuugguacugaugaggccguuaggccgaaauuucagg

SEQ ID NO: 12890 - RNA, 38 nt, Artificial Sequence
  Description of Artificial Sequence:  Enzymatic Nucleic Acid
ugauuuggcugaugaggccguuaggccgaaagauuuca

SEQ ID NO: 12891 - RNA, 38 nt, Artificial Sequence
  Description of Artificial Sequence:  Enzymatic Nucleic Acid
uccaacaucugaugaggccguuaggccgaaauuuggua

SEQ ID NO: 12892 - RNA, 38 nt, Artificial Sequence
  Description of Artificial Sequence:  Enzymatic Nucleic Acid
agcaaucccugaugaggccguuaggccgaaacaugauu

SEQ ID NO: 12893 - RNA, 38 nt, Artificial Sequence
  Description of Artificial Sequence:  Enzymatic Nucleic Acid
gugccagccugaugaggccguuaggccgaaauccaaca

SEQ ID NO: 12894 - RNA, 38 nt, Artificial Sequence
  Description of Artificial Sequence:  Enzymatic Nucleic Acid
guucagcacugaugaggccguuaggccgaaaccggggc

SEQ ID NO: 12895 - RNA, 38 nt, Artificial Sequence
  Description of Artificial Sequence:  Enzymatic Nucleic Acid
aguucagccugaugaggccguuaggccgaaaaccgggg

SEQ ID NO: 12896 - RNA, 38 nt, Artificial Sequence
  Description of Artificial Sequence:  Enzymatic Nucleic Acid
uucuccaccugaugaggccguuaggccgaaaguucagc

SEQ ID NO: 12897 - RNA, 38 nt, Artificial Sequence
  Description of Artificial Sequence:  Enzymatic Nucleic Acid
aggucacccugaugaggccguuaggccgaaaguuucuc

SEQ ID NO: 12898 - RNA, 38 nt, Artificial Sequence
  Description of Artificial Sequence:  Enzymatic Nucleic Acid
uuggcuugcugaugaggccguuaggccgaaagcagguc

SEQ ID NO: 12899 - RNA, 38 nt, Artificial Sequence
  Description of Artificial Sequence:  Enzymatic Nucleic Acid
guuggcuucugaugaggccguuaggccgaaaagcaggu

SEQ ID NO: 12900 - RNA, 38 nt, Artificial Sequence
  Description of Artificial Sequence:  Enzymatic Nucleic Acid
uccuguugcugaugaggccguuaggccgaaacguuggc

SEQ ID NO: 12901 - RNA, 38 nt, Artificial Sequence
  Description of Artificial Sequence:  Enzymatic Nucleic Acid
ggggaugucugaugaggccguuaggccgaaaucuuucc

SEQ ID NO: 12902 - RNA, 38 nt, Artificial Sequence
  Description of Artificial Sequence:  Enzymatic Nucleic Acid
gggggaugcugaugaggccguuaggccgaaaaucuuuc

SEQ ID NO: 12903 - RNA, 38 nt, Artificial Sequence
  Description of Artificial Sequence:  Enzymatic Nucleic Acid
uugaggggcugaugaggccguuaggccgaaauguaauc

SEQ ID NO: 12904 - RNA, 38 nt, Artificial Sequence
  Description of Artificial Sequence:  Enzymatic Nucleic Acid
auggcauucugaugaggccguuaggccgaaagggggau

SEQ ID NO: 12905 - RNA, 38 nt, Artificial Sequence
  Description of Artificial Sequence:  Enzymatic Nucleic Acid
cuagucagcugaugaggccguuaggccgaaauggcauu

SEQ ID NO: 12906 - RNA, 38 nt, Artificial Sequence
  Description of Artificial Sequence:  Enzymatic Nucleic Acid
acuguuuccugaugaggccguuaggccgaaagucagua

SEQ ID NO: 12907 - RNA, 38 nt, Artificial Sequence
  Description of Artificial Sequence:  Enzymatic Nucleic Acid
ugugaagccugaugaggccguuaggccgaaacuguuuc

SEQ ID NO: 12908 - RNA, 38 nt, Artificial Sequence
  Description of Artificial Sequence:  Enzymatic Nucleic Acid
aguaugugcugaugaggccguuaggccgaaagcuacug

SEQ ID NO: 12909 - RNA, 38 nt, Artificial Sequence
  Description of Artificial Sequence:  Enzymatic Nucleic Acid
gaguaugucugaugaggccguuaggccgaaaagcuacu

SEQ ID NO: 12910 - RNA, 38 nt, Artificial Sequence
  Description of Artificial Sequence:  Enzymatic Nucleic Acid
gggucgagcugaugaggccguuaggccgaaaugugaag

SEQ ID NO: 12911 - RNA, 38 nt, Artificial Sequence
  Description of Artificial Sequence:  Enzymatic Nucleic Acid
uggggguccugaugaggccguuaggccgaaaguaugug

SEQ ID NO: 12912 - RNA, 38 nt, Artificial Sequence
  Description of Artificial Sequence:  Enzymatic Nucleic Acid
ccucagagcugaugaggccguuaggccgaaaggugggg

SEQ ID NO: 12913 - RNA, 38 nt, Artificial Sequence
  Description of Artificial Sequence:  Enzymatic Nucleic Acid
uccucagacugaugaggccguuaggccgaaaagguggg

SEQ ID NO: 12914 - RNA, 38 nt, Artificial Sequence
  Description of Artificial Sequence:  Enzymatic Nucleic Acid
gguccucacugaugaggccguuaggccgaaagaaggug

SEQ ID NO: 12915 - RNA, 38 nt, Artificial Sequence
  Description of Artificial Sequence:  Enzymatic Nucleic Acid
uccuugaacugaugaggccguuaggccgaaagguccuc

SEQ ID NO: 12916 - RNA, 38 nt, Artificial Sequence
  Description of Artificial Sequence:  Enzymatic Nucleic Acid
guccuugacugaugaggccguuaggccgaaaagguccu

SEQ ID NO: 12917 - RNA, 38 nt, Artificial Sequence
  Description of Artificial Sequence:  Enzymatic Nucleic Acid
cguccuugcugaugaggccguuaggccgaaaaaggucc

SEQ ID NO: 12918 - RNA, 38 nt, Artificial Sequence
  Description of Artificial Sequence:  Enzymatic Nucleic Acid
ccguccuucugaugaggccguuaggccgaaaaaagguc

SEQ ID NO: 12919 - RNA, 38 nt, Artificial Sequence
  Description of Artificial Sequence:  Enzymatic Nucleic Acid
gaucugcacugaugaggccguuaggccgaaagccgucc

SEQ ID NO: 12920 - RNA, 38 nt, Artificial Sequence
  Description of Artificial Sequence:  Enzymatic Nucleic Acid
ggaucugccugaugaggccguuaggccgaaaagccguc

SEQ ID NO: 12921 - RNA, 38 nt, Artificial Sequence
  Description of Artificial Sequence:  Enzymatic Nucleic Acid
aaaaugugcugaugaggccguuaggccgaaaucugcaa

SEQ ID NO: 12922 - RNA, 38 nt, Artificial Sequence
  Description of Artificial Sequence:  Enzymatic Nucleic Acid
ggaaugaacugaugaggccguuaggccgaaauguggau

SEQ ID NO: 12923 - RNA, 38 nt, Artificial Sequence
  Description of Artificial Sequence:  Enzymatic Nucleic Acid
cggaaugacugaugaggccguuaggccgaaaaugugga

SEQ ID NO: 12924 - RNA, 38 nt, Artificial Sequence
  Description of Artificial Sequence:  Enzymatic Nucleic Acid
ccggaaugcugaugaggccguuaggccgaaaaaugugg

SEQ ID NO: 12925 - RNA, 38 nt, Artificial Sequence
  Description of Artificial Sequence:  Enzymatic Nucleic Acid
uccggaaucugaugaggccguuaggccgaaaaaaugug

SEQ ID NO: 12926 - RNA, 38 nt, Artificial Sequence
  Description of Artificial Sequence:  Enzymatic Nucleic Acid
gcuuccggcugaugaggccguuaggccgaaaugaaaau

SEQ ID NO: 12927 - RNA, 38 nt, Artificial Sequence
  Description of Artificial Sequence:  Enzymatic Nucleic Acid
agcuuccgcugaugaggccguuaggccgaaaaugaaaa

SEQ ID NO: 12928 - RNA, 38 nt, Artificial Sequence
  Description of Artificial Sequence:  Enzymatic Nucleic Acid
caucaucacugaugaggccguuaggccgaaagcuuccg

SEQ ID NO: 12929 - RNA, 38 nt, Artificial Sequence
  Description of Artificial Sequence:  Enzymatic Nucleic Acid
cguuuacacugaugaggccguuaggccgaaaucucaca

SEQ ID NO: 12930 - RNA, 38 nt, Artificial Sequence
  Description of Artificial Sequence:  Enzymatic Nucleic Acid
aaagcguucugaugaggccguuaggccgaaacauaucu

SEQ ID NO: 12931 - RNA, 38 nt, Artificial Sequence
  Description of Artificial Sequence:  Enzymatic Nucleic Acid
gaauuugacugaugaggccguuaggccgaaagcguuua

SEQ ID NO: 12932 - RNA, 38 nt, Artificial Sequence
  Description of Artificial Sequence:  Enzymatic Nucleic Acid
ugaauuugcugaugaggccguuaggccgaaaagcguuu

SEQ ID NO: 12933 - RNA, 38 nt, Artificial Sequence
  Description of Artificial Sequence:  Enzymatic Nucleic Acid
augaauuucugaugaggccguuaggccgaaaaagcguu

SEQ ID NO: 12934 - RNA, 38 nt, Artificial Sequence
  Description of Artificial Sequence:  Enzymatic Nucleic Acid
ggcucaugcugaugaggccguuaggccgaaauuugaaa

SEQ ID NO: 12935 - RNA, 38 nt, Artificial Sequence
  Description of Artificial Sequence:  Enzymatic Nucleic Acid
aggcucaucugaugaggccguuaggccgaaaauuugaa

SEQ ID NO: 12936 - RNA, 38 nt, Artificial Sequence
  Description of Artificial Sequence:  Enzymatic Nucleic Acid
gcuccucacugaugaggccguuaggccgaaagguuuug

SEQ ID NO: 12937 - RNA, 38 nt, Artificial Sequence
  Description of Artificial Sequence:  Enzymatic Nucleic Acid
agcuccuccugaugaggccguuaggccgaaaagguuuu

SEQ ID NO: 12938 - RNA, 38 nt, Artificial Sequence
  Description of Artificial Sequence:  Enzymatic Nucleic Acid
uucggugacugaugaggccguuaggccgaaagcuccuc

SEQ ID NO: 12939 - RNA, 38 nt, Artificial Sequence
  Description of Artificial Sequence:  Enzymatic Nucleic Acid
guucggugcugaugaggccguuaggccgaaaagcuccu

SEQ ID NO: 12940 - RNA, 38 nt, Artificial Sequence
  Description of Artificial Sequence:  Enzymatic Nucleic Acid
aguucggucugaugaggccguuaggccgaaaaagcucc

SEQ ID NO: 12941 - RNA, 38 nt, Artificial Sequence
  Description of Artificial Sequence:  Enzymatic Nucleic Acid
uggaggugcugaugaggccguuaggccgaaaguucggu

SEQ ID NO: 12942 - RNA, 38 nt, Artificial Sequence
  Description of Artificial Sequence:  Enzymatic Nucleic Acid
caaacaugcugaugaggccguuaggccgaaagguggag

SEQ ID NO: 12943 - RNA, 38 nt, Artificial Sequence
  Description of Artificial Sequence:  Enzymatic Nucleic Acid
aguccucacugaugaggccguuaggccgaaacauggag

SEQ ID NO: 12944 - RNA, 38 nt, Artificial Sequence
  Description of Artificial Sequence:  Enzymatic Nucleic Acid
uaguccuccugaugaggccguuaggccgaaaacaugga

SEQ ID NO: 12945 - RNA, 38 nt, Artificial Sequence
  Description of Artificial Sequence:  Enzymatic Nucleic Acid
ccagcugacugaugaggccguuaggccgaaaguccuca

SEQ ID NO: 12946 - RNA, 38 nt, Artificial Sequence
  Description of Artificial Sequence:  Enzymatic Nucleic Acid
guccagcucugaugaggccguuaggccgaaauaguccu

SEQ ID NO: 12947 - RNA, 38 nt, Artificial Sequence
  Description of Artificial Sequence:  Enzymatic Nucleic Acid
cagagugccugaugaggccguuaggccgaaagugucca

SEQ ID NO: 12948 - RNA, 38 nt, Artificial Sequence
  Description of Artificial Sequence:  Enzymatic Nucleic Acid
gcccagcacugaugaggccguuaggccgaaagugcuag

SEQ ID NO: 12949 - RNA, 38 nt, Artificial Sequence
  Description of Artificial Sequence:  Enzymatic Nucleic Acid
gcaaggggcugaugaggccguuaggccgaaagcccagc

SEQ ID NO: 12950 - RNA, 38 nt, Artificial Sequence
  Description of Artificial Sequence:  Enzymatic Nucleic Acid
gcuucagccugaugaggccguuaggccgaaagggggag

SEQ ID NO: 12951 - RNA, 38 nt, Artificial Sequence
  Description of Artificial Sequence:  Enzymatic Nucleic Acid
uccaggugcugaugaggccguuaggccgaaaccgcuuc

SEQ ID NO: 12952 - RNA, 38 nt, Artificial Sequence
  Description of Artificial Sequence:  Enzymatic Nucleic Acid
guccaggucugaugaggccguuaggccgaaaaccgcuu

SEQ ID NO: 12953 - RNA, 38 nt, Artificial Sequence
  Description of Artificial Sequence:  Enzymatic Nucleic Acid
ucuucaugcugaugaggccguuaggccgaaaggccuug

SEQ ID NO: 12954 - RNA, 38 nt, Artificial Sequence
  Description of Artificial Sequence:  Enzymatic Nucleic Acid
cucaaguccugaugaggccguuaggccgaaaucuucau

SEQ ID NO: 12955 - RNA, 38 nt, Artificial Sequence
  Description of Artificial Sequence:  Enzymatic Nucleic Acid
cuauucuccugaugaggccguuaggccgaaagucuauc

SEQ ID NO: 12956 - RNA, 38 nt, Artificial Sequence
  Description of Artificial Sequence:  Enzymatic Nucleic Acid
uuacucgccugaugaggccguuaggccgaaauucucaa

SEQ ID NO: 12957 - RNA, 38 nt, Artificial Sequence
  Description of Artificial Sequence:  Enzymatic Nucleic Acid
cuugcuuucugaugaggccguuaggccgaaacucgcua

SEQ ID NO: 12958 - RNA, 38 nt, Artificial Sequence
  Description of Artificial Sequence:  Enzymatic Nucleic Acid
agaucggacugaugaggccguuaggccgaaagucccgc

SEQ ID NO: 12959 - RNA, 38 nt, Artificial Sequence
  Description of Artificial Sequence:  Enzymatic Nucleic Acid
cagaucggcugaugaggccguuaggccgaaaagucccg

SEQ ID NO: 12960 - RNA, 38 nt, Artificial Sequence
  Description of Artificial Sequence:  Enzymatic Nucleic Acid
gcagaucgcugaugaggccguuaggccgaaaaaguccc

SEQ ID NO: 12961 - RNA, 38 nt, Artificial Sequence
  Description of Artificial Sequence:  Enzymatic Nucleic Acid
ccucggcacugaugaggccguuaggccgaaaucggaaa

SEQ ID NO: 12962 - RNA, 38 nt, Artificial Sequence
  Description of Artificial Sequence:  Enzymatic Nucleic Acid
agaagcagcugaugaggccguuaggccgaaagcugggc

SEQ ID NO: 12963 - RNA, 38 nt, Artificial Sequence
  Description of Artificial Sequence:  Enzymatic Nucleic Acid
gagaagcacugaugaggccguuaggccgaaaagcuggg

SEQ ID NO: 12964 - RNA, 38 nt, Artificial Sequence
  Description of Artificial Sequence:  Enzymatic Nucleic Acid
agcuggagcugaugaggccguuaggccgaaagcagaag

SEQ ID NO: 12965 - RNA, 38 nt, Artificial Sequence
  Description of Artificial Sequence:  Enzymatic Nucleic Acid
cagcuggacugaugaggccguuaggccgaaaagcagaa

SEQ ID NO: 12966 - RNA, 38 nt, Artificial Sequence
  Description of Artificial Sequence:  Enzymatic Nucleic Acid
cacagcugcugaugaggccguuaggccgaaagaagcag

SEQ ID NO: 12967 - RNA, 38 nt, Artificial Sequence
  Description of Artificial Sequence:  Enzymatic Nucleic Acid
acgggccucugaugaggccguuaggccgaaauguggcc

SEQ ID NO: 12968 - RNA, 38 nt, Artificial Sequence
  Description of Artificial Sequence:  Enzymatic Nucleic Acid
ccagcucacugaugaggccguuaggccgaaauucaucg

SEQ ID NO: 12969 - RNA, 38 nt, Artificial Sequence
  Description of Artificial Sequence:  Enzymatic Nucleic Acid
aacagcagcugaugaggccguuaggccgaaacuccuuu

SEQ ID NO: 12970 - RNA, 38 nt, Artificial Sequence
  Description of Artificial Sequence:  Enzymatic Nucleic Acid
ggguggagcugaugaggccguuaggccgaaacagcagg

SEQ ID NO: 12971 - RNA, 38 nt, Artificial Sequence
  Description of Artificial Sequence:  Enzymatic Nucleic Acid
gggguggacugaugaggccguuaggccgaaaacagcag

SEQ ID NO: 12972 - RNA, 38 nt, Artificial Sequence
  Description of Artificial Sequence:  Enzymatic Nucleic Acid
ugggggugcugaugaggccguuaggccgaaagaacagc

SEQ ID NO: 12973 - RNA, 38 nt, Artificial Sequence
  Description of Artificial Sequence:  Enzymatic Nucleic Acid
cggaguugcugaugaggccguuaggccgaaagucuggg

SEQ ID NO: 12974 - RNA, 38 nt, Artificial Sequence
  Description of Artificial Sequence:  Enzymatic Nucleic Acid
acaccacgcugaugaggccguuaggccgaaaguuguag

SEQ ID NO: 12975 - RNA, 38 nt, Artificial Sequence
  Description of Artificial Sequence:  Enzymatic Nucleic Acid
aggaguaccugaugaggccguuaggccgaaacaccacg

SEQ ID NO: 12976 - RNA, 38 nt, Artificial Sequence
  Description of Artificial Sequence:  Enzymatic Nucleic Acid
gggaggagcugaugaggccguuaggccgaaacaacacc

SEQ ID NO: 12977 - RNA, 38 nt, Artificial Sequence
  Description of Artificial Sequence:  Enzymatic Nucleic Acid
gcggggagcugaugaggccguuaggccgaaaguacaac

SEQ ID NO: 12978 - RNA, 38 nt, Artificial Sequence
  Description of Artificial Sequence:  Enzymatic Nucleic Acid
cgggcgggcugaugaggccguuaggccgaaaggaguac

SEQ ID NO: 12979 - RNA, 38 nt, Artificial Sequence
  Description of Artificial Sequence:  Enzymatic Nucleic Acid
agaagcuucugaugaggccguuaggccgaaaggcgggc

SEQ ID NO: 12980 - RNA, 38 nt, Artificial Sequence
  Description of Artificial Sequence:  Enzymatic Nucleic Acid
cuggugagcugaugaggccguuaggccgaaagcuuuag

SEQ ID NO: 12981 - RNA, 38 nt, Artificial Sequence
  Description of Artificial Sequence:  Enzymatic Nucleic Acid
gcuggugacugaugaggccguuaggccgaaaagcuuua

SEQ ID NO: 12982 - RNA, 38 nt, Artificial Sequence
  Description of Artificial Sequence:  Enzymatic Nucleic Acid
gggcuggucugaugaggccguuaggccgaaagaagcuu

SEQ ID NO: 12983 - RNA, 38 nt, Artificial Sequence
  Description of Artificial Sequence:  Enzymatic Nucleic Acid
auguauaacugaugaggccguuaggccgaaacugucag

SEQ ID NO: 12984 - RNA, 38 nt, Artificial Sequence
  Description of Artificial Sequence:  Enzymatic Nucleic Acid
agauguaucugaugaggccguuaggccgaaauacuguc

SEQ ID NO: 12985 - RNA, 38 nt, Artificial Sequence
  Description of Artificial Sequence:  Enzymatic Nucleic Acid
uagauguacugaugaggccguuaggccgaaaauacugu

SEQ ID NO: 12986 - RNA, 38 nt, Artificial Sequence
  Description of Artificial Sequence:  Enzymatic Nucleic Acid
cauagaugcugaugaggccguuaggccgaaauaauacu

SEQ ID NO: 12987 - RNA, 38 nt, Artificial Sequence
  Description of Artificial Sequence:  Enzymatic Nucleic Acid
aacucauacugaugaggccguuaggccgaaauguauaa

SEQ ID NO: 12988 - RNA, 38 nt, Artificial Sequence
  Description of Artificial Sequence:  Enzymatic Nucleic Acid
uaaacucacugaugaggccguuaggccgaaagauguau

SEQ ID NO: 12989 - RNA, 38 nt, Artificial Sequence
  Description of Artificial Sequence:  Enzymatic Nucleic Acid
uagguguacugaugaggccguuaggccgaaacucauag

SEQ ID NO: 12990 - RNA, 38 nt, Artificial Sequence
  Description of Artificial Sequence:  Enzymatic Nucleic Acid
auaggugucugaugaggccguuaggccgaaaacucaua

SEQ ID NO: 12991 - RNA, 38 nt, Artificial Sequence
  Description of Artificial Sequence:  Enzymatic Nucleic Acid
aauaggugcugaugaggccguuaggccgaaaaacucau

SEQ ID NO: 12992 - RNA, 38 nt, Artificial Sequence
  Description of Artificial Sequence:  Enzymatic Nucleic Acid
gagcggaacugaugaggccguuaggccgaaagguguaa

SEQ ID NO: 12993 - RNA, 38 nt, Artificial Sequence
  Description of Artificial Sequence:  Enzymatic Nucleic Acid
uggagcggcugaugaggccguuaggccgaaauaggugu

SEQ ID NO: 12994 - RNA, 38 nt, Artificial Sequence
  Description of Artificial Sequence:  Enzymatic Nucleic Acid
guggagcgcugaugaggccguuaggccgaaaauaggug

SEQ ID NO: 12995 - RNA, 38 nt, Artificial Sequence
  Description of Artificial Sequence:  Enzymatic Nucleic Acid
cuccugugcugaugaggccguuaggccgaaagcggaau

SEQ ID NO: 12996 - RNA, 38 nt, Artificial Sequence
  Description of Artificial Sequence:  Enzymatic Nucleic Acid
gucacgaacugaugaggccguuaggccgaaagcagcug

SEQ ID NO: 12997 - RNA, 38 nt, Artificial Sequence
  Description of Artificial Sequence:  Enzymatic Nucleic Acid
ggucacgacugaugaggccguuaggccgaaaagcagcu

SEQ ID NO: 12998 - RNA, 38 nt, Artificial Sequence
  Description of Artificial Sequence:  Enzymatic Nucleic Acid
aggucacgcugaugaggccguuaggccgaaaaagcagc

SEQ ID NO: 12999 - RNA, 38 nt, Artificial Sequence
  Description of Artificial Sequence:  Enzymatic Nucleic Acid
aaggucaccugaugaggccguuaggccgaaaaaagcag

SEQ ID NO: 13000 - RNA, 38 nt, Artificial Sequence
  Description of Artificial Sequence:  Enzymatic Nucleic Acid
cacgauuacugaugaggccguuaggccgaaaggucacg

SEQ ID NO: 13001 - RNA, 38 nt, Artificial Sequence
  Description of Artificial Sequence:  Enzymatic Nucleic Acid
gcacgauucugaugaggccguuaggccgaaaaggucac

SEQ ID NO: 13002 - RNA, 38 nt, Artificial Sequence
  Description of Artificial Sequence:  Enzymatic Nucleic Acid
agcacgaucugaugaggccguuaggccgaaaaagguca

SEQ ID NO: 13003 - RNA, 38 nt, Artificial Sequence
  Description of Artificial Sequence:  Enzymatic Nucleic Acid
aaaagcaccugaugaggccguuaggccgaaauuaaagg

SEQ ID NO: 13004 - RNA, 38 nt, Artificial Sequence
  Description of Artificial Sequence:  Enzymatic Nucleic Acid
aaacaaaacugaugaggccguuaggccgaaagcacgau

SEQ ID NO: 13005 - RNA, 38 nt, Artificial Sequence
  Description of Artificial Sequence:  Enzymatic Nucleic Acid
aaaacaaacugaugaggccguuaggccgaaaagcacga

SEQ ID NO: 13006 - RNA, 38 nt, Artificial Sequence
  Description of Artificial Sequence:  Enzymatic Nucleic Acid
aaaaacaacugaugaggccguuaggccgaaaaagcacg

SEQ ID NO: 13007 - RNA, 38 nt, Artificial Sequence
  Description of Artificial Sequence:  Enzymatic Nucleic Acid
aaaaaacacugaugaggccguuaggccgaaaaaagcac

SEQ ID NO: 13008 - RNA, 38 nt, Artificial Sequence
  Description of Artificial Sequence:  Enzymatic Nucleic Acid
caaaaaaccugaugaggccguuaggccgaaaaaaagca

SEQ ID NO: 13009 - RNA, 38 nt, Artificial Sequence
  Description of Artificial Sequence:  Enzymatic Nucleic Acid
aaacaaaacugaugaggccguuaggccgaaacaaaaaa

SEQ ID NO: 13010 - RNA, 38 nt, Artificial Sequence
  Description of Artificial Sequence:  Enzymatic Nucleic Acid
aaaacaaacugaugaggccguuaggccgaaaacaaaaa

SEQ ID NO: 13011 - RNA, 38 nt, Artificial Sequence
  Description of Artificial Sequence:  Enzymatic Nucleic Acid
caaaacaacugaugaggccguuaggccgaaaaacaaaa

SEQ ID NO: 13012 - RNA, 38 nt, Artificial Sequence
  Description of Artificial Sequence:  Enzymatic Nucleic Acid
acaaaacacugaugaggccguuaggccgaaaaaacaaa

SEQ ID NO: 13013 - RNA, 38 nt, Artificial Sequence
  Description of Artificial Sequence:  Enzymatic Nucleic Acid
aacaaaaccugaugaggccguuaggccgaaaaaaacaa

SEQ ID NO: 13014 - RNA, 38 nt, Artificial Sequence
  Description of Artificial Sequence:  Enzymatic Nucleic Acid
acaaacaacugaugaggccguuaggccgaaacaaaaaa

SEQ ID NO: 13015 - RNA, 38 nt, Artificial Sequence
  Description of Artificial Sequence:  Enzymatic Nucleic Acid
aacaaacacugaugaggccguuaggccgaaaacaaaaa

SEQ ID NO: 13016 - RNA, 38 nt, Artificial Sequence
  Description of Artificial Sequence:  Enzymatic Nucleic Acid
caacaaaccugaugaggccguuaggccgaaaaacaaaa

SEQ ID NO: 13017 - RNA, 38 nt, Artificial Sequence
  Description of Artificial Sequence:  Enzymatic Nucleic Acid
caacaacacugaugaggccguuaggccgaaacaaaaca

SEQ ID NO: 13018 - RNA, 38 nt, Artificial Sequence
  Description of Artificial Sequence:  Enzymatic Nucleic Acid
gcaacaaccugaugaggccguuaggccgaaaacaaaac

SEQ ID NO: 13019 - RNA, 38 nt, Artificial Sequence
  Description of Artificial Sequence:  Enzymatic Nucleic Acid
acagcaaccugaugaggccguuaggccgaaacaaacaa

SEQ ID NO: 13020 - RNA, 38 nt, Artificial Sequence
  Description of Artificial Sequence:  Enzymatic Nucleic Acid
aaaacagccugaugaggccguuaggccgaaacaacaaa

SEQ ID NO: 13021 - RNA, 38 nt, Artificial Sequence
  Description of Artificial Sequence:  Enzymatic Nucleic Acid
uuagucaacugaugaggccguuaggccgaaacagcaac

SEQ ID NO: 13022 - RNA, 38 nt, Artificial Sequence
  Description of Artificial Sequence:  Enzymatic Nucleic Acid
guuagucacugaugaggccguuaggccgaaaacagcaa

SEQ ID NO: 13023 - RNA, 38 nt, Artificial Sequence
  Description of Artificial Sequence:  Enzymatic Nucleic Acid
uguuaguccugaugaggccguuaggccgaaaaacagca

SEQ ID NO: 13024 - RNA, 38 nt, Artificial Sequence
  Description of Artificial Sequence:  Enzymatic Nucleic Acid
acuggggucugaugaggccguuaggccgaaacauucuu

SEQ ID NO: 13025 - RNA, 38 nt, Artificial Sequence
  Description of Artificial Sequence:  Enzymatic Nucleic Acid
acgucacucugaugaggccguuaggccgaaacuggggu

SEQ ID NO: 13026 - RNA, 38 nt, Artificial Sequence
  Description of Artificial Sequence:  Enzymatic Nucleic Acid
cacgucaccugaugaggccguuaggccgaaaacugggg

SEQ ID NO: 13027 - RNA, 38 nt, Artificial Sequence
  Description of Artificial Sequence:  Enzymatic Nucleic Acid
aacaauagcugaugaggccguuaggccgaaauucuuca

SEQ ID NO: 13028 - RNA, 38 nt, Artificial Sequence
  Description of Artificial Sequence:  Enzymatic Nucleic Acid
ucuaacaacugaugaggccguuaggccgaaaguauucu

SEQ ID NO: 13029 - RNA, 38 nt, Artificial Sequence
  Description of Artificial Sequence:  Enzymatic Nucleic Acid
ucucuaaccugaugaggccguuaggccgaaauaguauu

SEQ ID NO: 13030 - RNA, 38 nt, Artificial Sequence
  Description of Artificial Sequence:  Enzymatic Nucleic Acid
auuucucucugaugaggccguuaggccgaaacaauagu

SEQ ID NO: 13031 - RNA, 38 nt, Artificial Sequence
  Description of Artificial Sequence:  Enzymatic Nucleic Acid
gauuucuccugaugaggccguuaggccgaaaacaauag

SEQ ID NO: 13032 - RNA, 38 nt, Artificial Sequence
  Description of Artificial Sequence:  Enzymatic Nucleic Acid
gcggggggcugaugaggccguuaggccgaaauuucucu

SEQ ID NO: 13033 - RNA, 38 nt, Artificial Sequence
  Description of Artificial Sequence:  Enzymatic Nucleic Acid
guuacccucugaugaggccguuaggccgaaaggcuuug

SEQ ID NO: 13034 - RNA, 38 nt, Artificial Sequence
  Description of Artificial Sequence:  Enzymatic Nucleic Acid
guccaggucugaugaggccguuaggccgaaacccugag

SEQ ID NO: 13035 - RNA, 38 nt, Artificial Sequence
  Description of Artificial Sequence:  Enzymatic Nucleic Acid
ggucgccacugaugaggccguuaggccgaaaggcaccu

SEQ ID NO: 13036 - RNA, 38 nt, Artificial Sequence
  Description of Artificial Sequence:  Enzymatic Nucleic Acid
gcugcaggcugaugaggccguuaggccgaaaggguggg

SEQ ID NO: 13037 - RNA, 38 nt, Artificial Sequence
  Description of Artificial Sequence:  Enzymatic Nucleic Acid
acugccuccugaugaggccguuaggccgaaagucccac

SEQ ID NO: 13038 - RNA, 38 nt, Artificial Sequence
  Description of Artificial Sequence:  Enzymatic Nucleic Acid
aaugggcucugaugaggccguuaggccgaaacugccuc

SEQ ID NO: 13039 - RNA, 38 nt, Artificial Sequence
  Description of Artificial Sequence:  Enzymatic Nucleic Acid
caugagcucugaugaggccguuaggccgaaaugggcuu

SEQ ID NO: 13040 - RNA, 38 nt, Artificial Sequence
  Description of Artificial Sequence:  Enzymatic Nucleic Acid
ccaugagccugaugaggccguuaggccgaaaaugggcu

SEQ ID NO: 13041 - RNA, 38 nt, Artificial Sequence
  Description of Artificial Sequence:  Enzymatic Nucleic Acid
gcagccaucugaugaggccguuaggccgaaagcuaaug

SEQ ID NO: 13042 - RNA, 38 nt, Artificial Sequence
  Description of Artificial Sequence:  Enzymatic Nucleic Acid
gagagacacugaugaggccguuaggccgaaagcagguc

SEQ ID NO: 13043 - RNA, 38 nt, Artificial Sequence
  Description of Artificial Sequence:  Enzymatic Nucleic Acid
auaagagacugaugaggccguuaggccgaaacagagca

SEQ ID NO: 13044 - RNA, 38 nt, Artificial Sequence
  Description of Artificial Sequence:  Enzymatic Nucleic Acid
ccauaagacugaugaggccguuaggccgaaagacagag

SEQ ID NO: 13045 - RNA, 38 nt, Artificial Sequence
  Description of Artificial Sequence:  Enzymatic Nucleic Acid
cuccauaacugaugaggccguuaggccgaaagagacag

SEQ ID NO: 13046 - RNA, 38 nt, Artificial Sequence
  Description of Artificial Sequence:  Enzymatic Nucleic Acid
uccuccaucugaugaggccguuaggccgaaagagagac

SEQ ID NO: 13047 - RNA, 38 nt, Artificial Sequence
  Description of Artificial Sequence:  Enzymatic Nucleic Acid
uuccuccacugaugaggccguuaggccgaaaagagaga

SEQ ID NO: 13048 - RNA, 38 nt, Artificial Sequence
  Description of Artificial Sequence:  Enzymatic Nucleic Acid
gcaucccacugaugaggccguuaggccgaaagccuuuu

SEQ ID NO: 13049 - RNA, 38 nt, Artificial Sequence
  Description of Artificial Sequence:  Enzymatic Nucleic Acid
cgcauccccugaugaggccguuaggccgaaaagccuuu

SEQ ID NO: 13050 - RNA, 38 nt, Artificial Sequence
  Description of Artificial Sequence:  Enzymatic Nucleic Acid
acaggacgcugaugaggccguuaggccgaaacgcaucc

SEQ ID NO: 13051 - RNA, 38 nt, Artificial Sequence
  Description of Artificial Sequence:  Enzymatic Nucleic Acid
cuccacagcugaugaggccguuaggccgaaacggacgc

SEQ ID NO: 13052 - RNA, 38 nt, Artificial Sequence
  Description of Artificial Sequence:  Enzymatic Nucleic Acid
gcauagcgcugaugaggccguuaggccgaaagcccccu

SEQ ID NO: 13053 - RNA, 38 nt, Artificial Sequence
  Description of Artificial Sequence:  Enzymatic Nucleic Acid
aaguggcacugaugaggccguuaggccgaaagcggagc

SEQ ID NO: 13054 - RNA, 38 nt, Artificial Sequence
  Description of Artificial Sequence:  Enzymatic Nucleic Acid
agucacugcugaugaggccguuaggccgaaaguggcau

SEQ ID NO: 13055 - RNA, 38 nt, Artificial Sequence
  Description of Artificial Sequence:  Enzymatic Nucleic Acid
aagucacucugaugaggccguuaggccgaaaaguggca

SEQ ID NO: 13056 - RNA, 38 nt, Artificial Sequence
  Description of Artificial Sequence:  Enzymatic Nucleic Acid
ggagugagcugaugaggccguuaggccgaaagucacug

SEQ ID NO: 13057 - RNA, 38 nt, Artificial Sequence
  Description of Artificial Sequence:  Enzymatic Nucleic Acid
aggagugacugaugaggccguuaggccgaaaagucacu

SEQ ID NO: 13058 - RNA, 38 nt, Artificial Sequence
  Description of Artificial Sequence:  Enzymatic Nucleic Acid
ccaggagucugaugaggccguuaggccgaaagaaguca

SEQ ID NO: 13059 - RNA, 38 nt, Artificial Sequence
  Description of Artificial Sequence:  Enzymatic Nucleic Acid
gaggccagcugaugaggccguuaggccgaaagugagaa

SEQ ID NO: 13060 - RNA, 38 nt, Artificial Sequence
  Description of Artificial Sequence:  Enzymatic Nucleic Acid
aaacagcgcugaugaggccguuaggccgaaaggccagg

SEQ ID NO: 13061 - RNA, 38 nt, Artificial Sequence
  Description of Artificial Sequence:  Enzymatic Nucleic Acid
gggcccgacugaugaggccguuaggccgaaacagcgga

SEQ ID NO: 13062 - RNA, 38 nt, Artificial Sequence
  Description of Artificial Sequence:  Enzymatic Nucleic Acid
ggggcccgcugaugaggccguuaggccgaaaacagcgg

SEQ ID NO: 13063 - RNA, 38 nt, Artificial Sequence
  Description of Artificial Sequence:  Enzymatic Nucleic Acid
gggggccccugaugaggccguuaggccgaaaaacagcg

SEQ ID NO: 13064 - RNA, 38 nt, Artificial Sequence
  Description of Artificial Sequence:  Enzymatic Nucleic Acid
ccucuuggcugaugaggccguuaggccgaaagggggcc

SEQ ID NO: 13065 - RNA, 38 nt, Artificial Sequence
  Description of Artificial Sequence:  Enzymatic Nucleic Acid
accucuugcugaugaggccguuaggccgaaaagggggc

SEQ ID NO: 13066 - RNA, 38 nt, Artificial Sequence
  Description of Artificial Sequence:  Enzymatic Nucleic Acid
ugcucugacugaugaggccguuaggccgaaaccucuug

SEQ ID NO: 13067 - RNA, 38 nt, Artificial Sequence
  Description of Artificial Sequence:  Enzymatic Nucleic Acid
ucugcucucugaugaggccguuaggccgaaauaccucu

SEQ ID NO: 13068 - RNA, 38 nt, Artificial Sequence
  Description of Artificial Sequence:  Enzymatic Nucleic Acid
gucuaggacugaugaggccguuaggccgaaacgucccu

SEQ ID NO: 13069 - RNA, 38 nt, Artificial Sequence
  Description of Artificial Sequence:  Enzymatic Nucleic Acid
ggucuaggcugaugaggccguuaggccgaaaacguccc

SEQ ID NO: 13070 - RNA, 38 nt, Artificial Sequence
  Description of Artificial Sequence:  Enzymatic Nucleic Acid
uggucuagcugaugaggccguuaggccgaaaaacgucc

SEQ ID NO: 13071 - RNA, 38 nt, Artificial Sequence
  Description of Artificial Sequence:  Enzymatic Nucleic Acid
cccugguccugaugaggccguuaggccgaaaggaaacg

SEQ ID NO: 13072 - RNA, 38 nt, Artificial Sequence
  Description of Artificial Sequence:  Enzymatic Nucleic Acid
uucccgagcugaugaggccguuaggccgaaacaugugc

SEQ ID NO: 13073 - RNA, 38 nt, Artificial Sequence
  Description of Artificial Sequence:  Enzymatic Nucleic Acid
guucccgacugaugaggccguuaggccgaaaacaugug

SEQ ID NO: 13074 - RNA, 38 nt, Artificial Sequence
  Description of Artificial Sequence:  Enzymatic Nucleic Acid
ugguuccccugaugaggccguuaggccgaaagaacaug

SEQ ID NO: 13075 - RNA, 38 nt, Artificial Sequence
  Description of Artificial Sequence:  Enzymatic Nucleic Acid
uuaagauucugaugaggccguuaggccgaaacuguggu

SEQ ID NO: 13076 - RNA, 38 nt, Artificial Sequence
  Description of Artificial Sequence:  Enzymatic Nucleic Acid
uuuaagaucugaugaggccguuaggccgaaaacugugg

SEQ ID NO: 13077 - RNA, 38 nt, Artificial Sequence
  Description of Artificial Sequence:  Enzymatic Nucleic Acid
agauuuaacugaugaggccguuaggccgaaauuaacug

SEQ ID NO: 13078 - RNA, 38 nt, Artificial Sequence
  Description of Artificial Sequence:  Enzymatic Nucleic Acid
aaagauuucugaugaggccguuaggccgaaagauuaac

SEQ ID NO: 13079 - RNA, 38 nt, Artificial Sequence
  Description of Artificial Sequence:  Enzymatic Nucleic Acid
aaaagauucugaugaggccguuaggccgaaaagauuaa

SEQ ID NO: 13080 - RNA, 38 nt, Artificial Sequence
  Description of Artificial Sequence:  Enzymatic Nucleic Acid
cgggaaaacugaugaggccguuaggccgaaauuuaaga

SEQ ID NO: 13081 - RNA, 38 nt, Artificial Sequence
  Description of Artificial Sequence:  Enzymatic Nucleic Acid
cccgggaacugaugaggccguuaggccgaaagauuuaa

SEQ ID NO: 13082 - RNA, 38 nt, Artificial Sequence
  Description of Artificial Sequence:  Enzymatic Nucleic Acid
ucccgggacugaugaggccguuaggccgaaaagauuua

SEQ ID NO: 13083 - RNA, 38 nt, Artificial Sequence
  Description of Artificial Sequence:  Enzymatic Nucleic Acid
cucccgggcugaugaggccguuaggccgaaaaagauuu

SEQ ID NO: 13084 - RNA, 38 nt, Artificial Sequence
  Description of Artificial Sequence:  Enzymatic Nucleic Acid
acucccggcugaugaggccguuaggccgaaaaaagauu

SEQ ID NO: 13085 - RNA, 38 nt, Artificial Sequence
  Description of Artificial Sequence:  Enzymatic Nucleic Acid
caacagaacugaugaggccguuaggccgaaacucccgg

SEQ ID NO: 13086 - RNA, 38 nt, Artificial Sequence
  Description of Artificial Sequence:  Enzymatic Nucleic Acid
gacaacagcugaugaggccguuaggccgaaagacuccc

SEQ ID NO: 13087 - RNA, 38 nt, Artificial Sequence
  Description of Artificial Sequence:  Enzymatic Nucleic Acid
agacaacacugaugaggccguuaggccgaaaagacucc

SEQ ID NO: 13088 - RNA, 38 nt, Artificial Sequence
  Description of Artificial Sequence:  Enzymatic Nucleic Acid
aaacagaccugaugaggccguuaggccgaaacagaaga

SEQ ID NO: 13089 - RNA, 38 nt, Artificial Sequence
  Description of Artificial Sequence:  Enzymatic Nucleic Acid
gguaaacacugaugaggccguuaggccgaaacaacaga

SEQ ID NO: 13090 - RNA, 38 nt, Artificial Sequence
  Description of Artificial Sequence:  Enzymatic Nucleic Acid
ggaugguacugaugaggccguuaggccgaaacagacaa

SEQ ID NO: 13091 - RNA, 38 nt, Artificial Sequence
  Description of Artificial Sequence:  Enzymatic Nucleic Acid
uggauggucugaugaggccguuaggccgaaaacagaca

SEQ ID NO: 13092 - RNA, 38 nt, Artificial Sequence
  Description of Artificial Sequence:  Enzymatic Nucleic Acid
uuggauggcugaugaggccguuaggccgaaaaacagac

SEQ ID NO: 13093 - RNA, 38 nt, Artificial Sequence
  Description of Artificial Sequence:  Enzymatic Nucleic Acid
augcuuugcugaugaggccguuaggccgaaaugguaaa

SEQ ID NO: 13094 - RNA, 38 nt, Artificial Sequence
  Description of Artificial Sequence:  Enzymatic Nucleic Acid
auguuaaacugaugaggccguuaggccgaaaugcuuug

SEQ ID NO: 13095 - RNA, 38 nt, Artificial Sequence
  Description of Artificial Sequence:  Enzymatic Nucleic Acid
acauguuacugaugaggccguuaggccgaaauaugcuu

SEQ ID NO: 13096 - RNA, 38 nt, Artificial Sequence
  Description of Artificial Sequence:  Enzymatic Nucleic Acid
cacauguucugaugaggccguuaggccgaaaauaugcu

SEQ ID NO: 13097 - RNA, 38 nt, Artificial Sequence
  Description of Artificial Sequence:  Enzymatic Nucleic Acid
acacaugucugaugaggccguuaggccgaaaaauaugc

SEQ ID NO: 13098 - RNA, 38 nt, Artificial Sequence
  Description of Artificial Sequence:  Enzymatic Nucleic Acid
cccccacucugaugaggccguuaggccgaaacacaugu

SEQ ID NO: 13099 - RNA, 38 nt, Artificial Sequence
  Description of Artificial Sequence:  Enzymatic Nucleic Acid
cagaagcccugaugaggccguuaggccgaaagcgccac

SEQ ID NO: 13100 - RNA, 38 nt, Artificial Sequence
  Description of Artificial Sequence:  Enzymatic Nucleic Acid
ggccucagcugaugaggccguuaggccgaaagccaagc

SEQ ID NO: 13101 - RNA, 38 nt, Artificial Sequence
  Description of Artificial Sequence:  Enzymatic Nucleic Acid
uggccucacugaugaggccguuaggccgaaaagccaag

SEQ ID NO: 13102 - RNA, 38 nt, Artificial Sequence
  Description of Artificial Sequence:  Enzymatic Nucleic Acid
gaacugaucugaugaggccguuaggccgaaauggcucu

SEQ ID NO: 13103 - RNA, 38 nt, Artificial Sequence
  Description of Artificial Sequence:  Enzymatic Nucleic Acid
gaggaacucugaugaggccguuaggccgaaaugauggc

SEQ ID NO: 13104 - RNA, 38 nt, Artificial Sequence
  Description of Artificial Sequence:  Enzymatic Nucleic Acid
acuagaggcugaugaggccguuaggccgaaacugauga

SEQ ID NO: 13105 - RNA, 38 nt, Artificial Sequence
  Description of Artificial Sequence:  Enzymatic Nucleic Acid
cacuagagcugaugaggccguuaggccgaaaacugaug

SEQ ID NO: 13106 - RNA, 38 nt, Artificial Sequence
  Description of Artificial Sequence:  Enzymatic Nucleic Acid
ucucacuacugaugaggccguuaggccgaaaggaacug

SEQ ID NO: 13107 - RNA, 38 nt, Artificial Sequence
  Description of Artificial Sequence:  Enzymatic Nucleic Acid
caucucaccugaugaggccguuaggccgaaagaggaac

SEQ ID NO: 13108 - RNA, 38 nt, Artificial Sequence
  Description of Artificial Sequence:  Enzymatic Nucleic Acid
augaccuccugaugaggccguuaggccgaaaugcaucu

SEQ ID NO: 13109 - RNA, 38 nt, Artificial Sequence
  Description of Artificial Sequence:  Enzymatic Nucleic Acid
uuggguaucugaugaggccguuaggccgaaaccucaau

SEQ ID NO: 13110 - RNA, 38 nt, Artificial Sequence
  Description of Artificial Sequence:  Enzymatic Nucleic Acid
agcuugggcugaugaggccguuaggccgaaaugaccuc

SEQ ID NO: 13111 - RNA, 38 nt, Artificial Sequence
  Description of Artificial Sequence:  Enzymatic Nucleic Acid
aggccugccugaugaggccguuaggccgaaagcuuggg

SEQ ID NO: 13112 - RNA, 38 nt, Artificial Sequence
  Description of Artificial Sequence:  Enzymatic Nucleic Acid
aguaugcgcugaugaggccguuaggccgaaaggucagg

SEQ ID NO: 13113 - RNA, 38 nt, Artificial Sequence
  Description of Artificial Sequence:  Enzymatic Nucleic Acid
caguaugccugaugaggccguuaggccgaaaaggucag

SEQ ID NO: 13114 - RNA, 38 nt, Artificial Sequence
  Description of Artificial Sequence:  Enzymatic Nucleic Acid
gugagcagcugaugaggccguuaggccgaaaugcgaag

SEQ ID NO: 13115 - RNA, 38 nt, Artificial Sequence
  Description of Artificial Sequence:  Enzymatic Nucleic Acid
cuccccgucugaugaggccguuaggccgaaagcaguau

SEQ ID NO: 13116 - RNA, 38 nt, Artificial Sequence
  Description of Artificial Sequence:  Enzymatic Nucleic Acid
gaccacuucugaugaggccguuaggccgaaacuccccg

SEQ ID NO: 13117 - RNA, 38 nt, Artificial Sequence
  Description of Artificial Sequence:  Enzymatic Nucleic Acid
ggaccacucugaugaggccguuaggccgaaaacucccc

SEQ ID NO: 13118 - RNA, 38 nt, Artificial Sequence
  Description of Artificial Sequence:  Enzymatic Nucleic Acid
ccaaacugcugaugaggccguuaggccgaaaccacuua

SEQ ID NO: 13119 - RNA, 38 nt, Artificial Sequence
  Description of Artificial Sequence:  Enzymatic Nucleic Acid
cuaggccacugaugaggccguuaggccgaaacuggacc

SEQ ID NO: 13120 - RNA, 38 nt, Artificial Sequence
  Description of Artificial Sequence:  Enzymatic Nucleic Acid
acuaggcccugaugaggccguuaggccgaaaacuggac

SEQ ID NO: 13121 - RNA, 38 nt, Artificial Sequence
  Description of Artificial Sequence:  Enzymatic Nucleic Acid
aaccuuaccugaugaggccguuaggccgaaaggccaaa

SEQ ID NO: 13122 - RNA, 38 nt, Artificial Sequence
  Description of Artificial Sequence:  Enzymatic Nucleic Acid
ggcaaccucugaugaggccguuaggccgaaacuaggcc

SEQ ID NO: 13123 - RNA, 38 nt, Artificial Sequence
  Description of Artificial Sequence:  Enzymatic Nucleic Acid
caguaggccugaugaggccguuaggccgaaaccuuacu

SEQ ID NO: 13124 - RNA, 38 nt, Artificial Sequence
  Description of Artificial Sequence:  Enzymatic Nucleic Acid
cccaucagcugaugaggccguuaggccgaaaggcaacc

SEQ ID NO: 13125 - RNA, 38 nt, Artificial Sequence
  Description of Artificial Sequence:  Enzymatic Nucleic Acid
uggcuuuucugaugaggccguuaggccgaaagcccauc

SEQ ID NO: 13126 - RNA, 38 nt, Artificial Sequence
  Description of Artificial Sequence:  Enzymatic Nucleic Acid
cuguuuaacugaugaggccguuaggccgaaauguggcu

SEQ ID NO: 13127 - RNA, 38 nt, Artificial Sequence
  Description of Artificial Sequence:  Enzymatic Nucleic Acid
ccuguuuacugaugaggccguuaggccgaaaauguggc

SEQ ID NO: 13128 - RNA, 38 nt, Artificial Sequence
  Description of Artificial Sequence:  Enzymatic Nucleic Acid
accuguuucugaugaggccguuaggccgaaaaaugugg

SEQ ID NO: 13129 - RNA, 38 nt, Artificial Sequence
  Description of Artificial Sequence:  Enzymatic Nucleic Acid
aaccuguucugaugaggccguuaggccgaaaaaaugug

SEQ ID NO: 13130 - RNA, 38 nt, Artificial Sequence
  Description of Artificial Sequence:  Enzymatic Nucleic Acid
ugagauaacugaugaggccguuaggccgaaaccuguuu

SEQ ID NO: 13131 - RNA, 38 nt, Artificial Sequence
  Description of Artificial Sequence:  Enzymatic Nucleic Acid
uugagauacugaugaggccguuaggccgaaaaccuguu

SEQ ID NO: 13132 - RNA, 38 nt, Artificial Sequence
  Description of Artificial Sequence:  Enzymatic Nucleic Acid
cuugagaucugaugaggccguuaggccgaaaaaccugu

SEQ ID NO: 13133 - RNA, 38 nt, Artificial Sequence
  Description of Artificial Sequence:  Enzymatic Nucleic Acid
acuugagacugaugaggccguuaggccgaaaaaaccug

SEQ ID NO: 13134 - RNA, 38 nt, Artificial Sequence
  Description of Artificial Sequence:  Enzymatic Nucleic Acid
auacuugacugaugaggccguuaggccgaaauaaaacc

SEQ ID NO: 13135 - RNA, 38 nt, Artificial Sequence
  Description of Artificial Sequence:  Enzymatic Nucleic Acid
uaauacuucugaugaggccguuaggccgaaagauaaaa

SEQ ID NO: 13136 - RNA, 38 nt, Artificial Sequence
  Description of Artificial Sequence:  Enzymatic Nucleic Acid
uauauuaacugaugaggccguuaggccgaaacuugaga

SEQ ID NO: 13137 - RNA, 38 nt, Artificial Sequence
  Description of Artificial Sequence:  Enzymatic Nucleic Acid
uauauauucugaugaggccguuaggccgaaauacuuga

SEQ ID NO: 13138 - RNA, 38 nt, Artificial Sequence
  Description of Artificial Sequence:  Enzymatic Nucleic Acid
cuauauaucugaugaggccguuaggccgaaaauacuug

SEQ ID NO: 13139 - RNA, 38 nt, Artificial Sequence
  Description of Artificial Sequence:  Enzymatic Nucleic Acid
ugucuauacugaugaggccguuaggccgaaauuaauac

SEQ ID NO: 13140 - RNA, 38 nt, Artificial Sequence
  Description of Artificial Sequence:  Enzymatic Nucleic Acid
cuugucuacugaugaggccguuaggccgaaauauuaau

SEQ ID NO: 13141 - RNA, 38 nt, Artificial Sequence
  Description of Artificial Sequence:  Enzymatic Nucleic Acid
gucuuguccugaugaggccguuaggccgaaauauauua

SEQ ID NO: 13142 - RNA, 38 nt, Artificial Sequence
  Description of Artificial Sequence:  Enzymatic Nucleic Acid
uaaugcaucugaugaggccguuaggccgaaagugucuu

SEQ ID NO: 13143 - RNA, 38 nt, Artificial Sequence
  Description of Artificial Sequence:  Enzymatic Nucleic Acid
auaaugcacugaugaggccguuaggccgaaaagugucu

SEQ ID NO: 13144 - RNA, 38 nt, Artificial Sequence
  Description of Artificial Sequence:  Enzymatic Nucleic Acid
aacaggaucugaugaggccguuaggccgaaaugcauaa

SEQ ID NO: 13145 - RNA, 38 nt, Artificial Sequence
  Description of Artificial Sequence:  Enzymatic Nucleic Acid
aaacaggacugaugaggccguuaggccgaaaaugcaua

SEQ ID NO: 13146 - RNA, 38 nt, Artificial Sequence
  Description of Artificial Sequence:  Enzymatic Nucleic Acid
uaaaacagcugaugaggccguuaggccgaaauaaugca

SEQ ID NO: 13147 - RNA, 38 nt, Artificial Sequence
  Description of Artificial Sequence:  Enzymatic Nucleic Acid
auauauaacugaugaggccguuaggccgaaacaggaua

SEQ ID NO: 13148 - RNA, 38 nt, Artificial Sequence
  Description of Artificial Sequence:  Enzymatic Nucleic Acid
gauauauacugaugaggccguuaggccgaaaacaggau

SEQ ID NO: 13149 - RNA, 38 nt, Artificial Sequence
  Description of Artificial Sequence:  Enzymatic Nucleic Acid
ggauauaucugaugaggccguuaggccgaaaaacagga

SEQ ID NO: 13150 - RNA, 38 nt, Artificial Sequence
  Description of Artificial Sequence:  Enzymatic Nucleic Acid
uggauauacugaugaggccguuaggccgaaaaaacagg

SEQ ID NO: 13151 - RNA, 38 nt, Artificial Sequence
  Description of Artificial Sequence:  Enzymatic Nucleic Acid
auuggauacugaugaggccguuaggccgaaauaaaaca

SEQ ID NO: 13152 - RNA, 38 nt, Artificial Sequence
  Description of Artificial Sequence:  Enzymatic Nucleic Acid
ucauuggacugaugaggccguuaggccgaaauauaaaa

SEQ ID NO: 13153 - RNA, 38 nt, Artificial Sequence
  Description of Artificial Sequence:  Enzymatic Nucleic Acid
auucauugcugaugaggccguuaggccgaaauauauaa

SEQ ID NO: 13154 - RNA, 38 nt, Artificial Sequence
  Description of Artificial Sequence:  Enzymatic Nucleic Acid
cccaguuacugaugaggccguuaggccgaaauucauug

SEQ ID NO: 13155 - RNA, 38 nt, Artificial Sequence
  Description of Artificial Sequence:  Enzymatic Nucleic Acid
gccccagucugaugaggccguuaggccgaaauauucau

SEQ ID NO: 13156 - RNA, 38 nt, Artificial Sequence
  Description of Artificial Sequence:  Enzymatic Nucleic Acid
ugacucuucugaugaggccguuaggccgaaacucgccc

SEQ ID NO: 13157 - RNA, 38 nt, Artificial Sequence
  Description of Artificial Sequence:  Enzymatic Nucleic Acid
augacucucugaugaggccguuaggccgaaaacucgcc

SEQ ID NO: 13158 - RNA, 38 nt, Artificial Sequence
  Description of Artificial Sequence:  Enzymatic Nucleic Acid
uagaccaucugaugaggccguuaggccgaaacucuuaa

SEQ ID NO: 13159 - RNA, 38 nt, Artificial Sequence
  Description of Artificial Sequence:  Enzymatic Nucleic Acid
cuuuucuacugaugaggccguuaggccgaaaccaugac

SEQ ID NO: 13160 - RNA, 38 nt, Artificial Sequence
  Description of Artificial Sequence:  Enzymatic Nucleic Acid
cccuuuuccugaugaggccguuaggccgaaagaccaug

SEQ ID NO: 13161 - RNA, 38 nt, Artificial Sequence
  Description of Artificial Sequence:  Enzymatic Nucleic Acid
uacagagacugaugaggccguuaggccgaaaccccuuu

SEQ ID NO: 13162 - RNA, 38 nt, Artificial Sequence
  Description of Artificial Sequence:  Enzymatic Nucleic Acid
guacagagcugaugaggccguuaggccgaaaaccccuu

SEQ ID NO: 13163 - RNA, 38 nt, Artificial Sequence
  Description of Artificial Sequence:  Enzymatic Nucleic Acid
gguacagacugaugaggccguuaggccgaaaaaccccu

SEQ ID NO: 13164 - RNA, 38 nt, Artificial Sequence
  Description of Artificial Sequence:  Enzymatic Nucleic Acid
uggguacacugaugaggccguuaggccgaaagaaaccc

SEQ ID NO: 13165 - RNA, 38 nt, Artificial Sequence
  Description of Artificial Sequence:  Enzymatic Nucleic Acid
gauuugggcugaugaggccguuaggccgaaacagagaa

SEQ ID NO: 13166 - RNA, 38 nt, Artificial Sequence
  Description of Artificial Sequence:  Enzymatic Nucleic Acid
accagccccugaugaggccguuaggccgaaauuugggu

SEQ ID NO: 13167 - RNA, 38 nt, Artificial Sequence
  Description of Artificial Sequence:  Enzymatic Nucleic Acid
cuuggucccugaugaggccguuaggccgaaaccagccc

SEQ ID NO: 13168 - RNA, 38 nt, Artificial Sequence
  Description of Artificial Sequence:  Enzymatic Nucleic Acid
gcugggaccugaugaggccguuaggccgaaaccacucu

SEQ ID NO: 13169 - RNA, 38 nt, Artificial Sequence
  Description of Artificial Sequence:  Enzymatic Nucleic Acid
auagcuggcugaugaggccguuaggccgaaacaaccac

SEQ ID NO: 13170 - RNA, 38 nt, Artificial Sequence
  Description of Artificial Sequence:  Enzymatic Nucleic Acid
aguaacuacugaugaggccguuaggccgaaagcuggga

SEQ ID NO: 13171 - RNA, 38 nt, Artificial Sequence
  Description of Artificial Sequence:  Enzymatic Nucleic Acid
uuaguaaccugaugaggccguuaggccgaaauagcugg

SEQ ID NO: 13172 - RNA, 38 nt, Artificial Sequence
  Description of Artificial Sequence:  Enzymatic Nucleic Acid
aguuuagucugaugaggccguuaggccgaaacuauagc

SEQ ID NO: 13173 - RNA, 38 nt, Artificial Sequence
  Description of Artificial Sequence:  Enzymatic Nucleic Acid
uaguuuagcugaugaggccguuaggccgaaaacuauag

SEQ ID NO: 13174 - RNA, 38 nt, Artificial Sequence
  Description of Artificial Sequence:  Enzymatic Nucleic Acid
gaguaguucugaugaggccguuaggccgaaaguaacua

SEQ ID NO: 13175 - RNA, 38 nt, Artificial Sequence
  Description of Artificial Sequence:  Enzymatic Nucleic Acid
ugggugagcugaugaggccguuaggccgaaaguuuagu

SEQ ID NO: 13176 - RNA, 38 nt, Artificial Sequence
  Description of Artificial Sequence:  Enzymatic Nucleic Acid
cuuugggucugaugaggccguuaggccgaaaguaguuu

SEQ ID NO: 13177 - RNA, 38 nt, Artificial Sequence
  Description of Artificial Sequence:  Enzymatic Nucleic Acid
gagguccccugaugaggccguuaggccgaaacuuuggg

SEQ ID NO: 13178 - RNA, 38 nt, Artificial Sequence
  Description of Artificial Sequence:  Enzymatic Nucleic Acid
aagccagucugaugaggccguuaggccgaaagguccca

SEQ ID NO: 13179 - RNA, 38 nt, Artificial Sequence
  Description of Artificial Sequence:  Enzymatic Nucleic Acid
guaaagagcugaugaggccguuaggccgaaagccagug

SEQ ID NO: 13180 - RNA, 38 nt, Artificial Sequence
  Description of Artificial Sequence:  Enzymatic Nucleic Acid
aguaaagacugaugaggccguuaggccgaaaagccagu

SEQ ID NO: 13181 - RNA, 38 nt, Artificial Sequence
  Description of Artificial Sequence:  Enzymatic Nucleic Acid
gaaguaaacugaugaggccguuaggccgaaagaagcca

SEQ ID NO: 13182 - RNA, 38 nt, Artificial Sequence
  Description of Artificial Sequence:  Enzymatic Nucleic Acid
augaaguacugaugaggccguuaggccgaaagagaagc

SEQ ID NO: 13183 - RNA, 38 nt, Artificial Sequence
  Description of Artificial Sequence:  Enzymatic Nucleic Acid
gaugaagucugaugaggccguuaggccgaaaagagaag

SEQ ID NO: 13184 - RNA, 38 nt, Artificial Sequence
  Description of Artificial Sequence:  Enzymatic Nucleic Acid
ugaugaagcugaugaggccguuaggccgaaaaagagaa

SEQ ID NO: 13185 - RNA, 38 nt, Artificial Sequence
  Description of Artificial Sequence:  Enzymatic Nucleic Acid
ccaugaugcugaugaggccguuaggccgaaaguaaaga

SEQ ID NO: 13186 - RNA, 38 nt, Artificial Sequence
  Description of Artificial Sequence:  Enzymatic Nucleic Acid
uccaugaucugaugaggccguuaggccgaaaaguaaag

SEQ ID NO: 13187 - RNA, 38 nt, Artificial Sequence
  Description of Artificial Sequence:  Enzymatic Nucleic Acid
aaauccaucugaugaggccguuaggccgaaaugaagua

SEQ ID NO: 13188 - RNA, 38 nt, Artificial Sequence
  Description of Artificial Sequence:  Enzymatic Nucleic Acid
gauggugacugaugaggccguuaggccgaaauccauga

SEQ ID NO: 13189 - RNA, 38 nt, Artificial Sequence
  Description of Artificial Sequence:  Enzymatic Nucleic Acid
ggauggugcugaugaggccguuaggccgaaaauccaug

SEQ ID NO: 13190 - RNA, 38 nt, Artificial Sequence
  Description of Artificial Sequence:  Enzymatic Nucleic Acid
gggauggucugaugaggccguuaggccgaaaaauccau

SEQ ID NO: 13191 - RNA, 38 nt, Artificial Sequence
  Description of Artificial Sequence:  Enzymatic Nucleic Acid
ugccuuggcugaugaggccguuaggccgaaauggugaa

SEQ ID NO: 13192 - RNA, 38 nt, Artificial Sequence
  Description of Artificial Sequence:  Enzymatic Nucleic Acid
uccucucacugaugaggccguuaggccgaaacugccuu

SEQ ID NO: 13193 - RNA, 38 nt, Artificial Sequence
  Description of Artificial Sequence:  Enzymatic Nucleic Acid
auacucuucugaugaggccguuaggccgaaagcuccuc

SEQ ID NO: 13194 - RNA, 38 nt, Artificial Sequence
  Description of Artificial Sequence:  Enzymatic Nucleic Acid
ugggcugacugaugaggccguuaggccgaaacucuuua

SEQ ID NO: 13195 - RNA, 38 nt, Artificial Sequence
  Description of Artificial Sequence:  Enzymatic Nucleic Acid
uaugggcucugaugaggccguuaggccgaaauacucuu

SEQ ID NO: 13196 - RNA, 38 nt, Artificial Sequence
  Description of Artificial Sequence:  Enzymatic Nucleic Acid
uuaauaaacugaugaggccguuaggccgaaaugggcug

SEQ ID NO: 13197 - RNA, 38 nt, Artificial Sequence
  Description of Artificial Sequence:  Enzymatic Nucleic Acid
gcuuaauacugaugaggccguuaggccgaaauaugggc

SEQ ID NO: 13198 - RNA, 38 nt, Artificial Sequence
  Description of Artificial Sequence:  Enzymatic Nucleic Acid
ugcuuaaucugaugaggccguuaggccgaaaauauggg

SEQ ID NO: 13199 - RNA, 38 nt, Artificial Sequence
  Description of Artificial Sequence:  Enzymatic Nucleic Acid
gugcuuaacugaugaggccguuaggccgaaaaauaugg

SEQ ID NO: 13200 - RNA, 38 nt, Artificial Sequence
  Description of Artificial Sequence:  Enzymatic Nucleic Acid
aagugcuucugaugaggccguuaggccgaaauaaauau

SEQ ID NO: 13201 - RNA, 38 nt, Artificial Sequence
  Description of Artificial Sequence:  Enzymatic Nucleic Acid
aaagugcucugaugaggccguuaggccgaaaauaaaua

SEQ ID NO: 13202 - RNA, 38 nt, Artificial Sequence
  Description of Artificial Sequence:  Enzymatic Nucleic Acid
ggagcauacugaugaggccguuaggccgaaagugcuua

SEQ ID NO: 13203 - RNA, 38 nt, Artificial Sequence
  Description of Artificial Sequence:  Enzymatic Nucleic Acid
aggagcaucugaugaggccguuaggccgaaaagugcuu

SEQ ID NO: 13204 - RNA, 38 nt, Artificial Sequence
  Description of Artificial Sequence:  Enzymatic Nucleic Acid
aaggagcacugaugaggccguuaggccgaaaaagugcu

SEQ ID NO: 13205 - RNA, 38 nt, Artificial Sequence
  Description of Artificial Sequence:  Enzymatic Nucleic Acid
gugccaagcugaugaggccguuaggccgaaagcauaaa

SEQ ID NO: 13206 - RNA, 38 nt, Artificial Sequence
  Description of Artificial Sequence:  Enzymatic Nucleic Acid
gcugugcccugaugaggccguuaggccgaaaggagcau

SEQ ID NO: 13207 - RNA, 38 nt, Artificial Sequence
  Description of Artificial Sequence:  Enzymatic Nucleic Acid
gcauaaaucugaugaggccguuaggccgaaacacauca

SEQ ID NO: 13208 - RNA, 38 nt, Artificial Sequence
  Description of Artificial Sequence:  Enzymatic Nucleic Acid
cuugcauacugaugaggccguuaggccgaaauuacaca

SEQ ID NO: 13209 - RNA, 38 nt, Artificial Sequence
  Description of Artificial Sequence:  Enzymatic Nucleic Acid
gcuugcaucugaugaggccguuaggccgaaaauuacac

SEQ ID NO: 13210 - RNA, 38 nt, Artificial Sequence
  Description of Artificial Sequence:  Enzymatic Nucleic Acid
agcuugcacugaugaggccguuaggccgaaaaauuaca

SEQ ID NO: 13211 - RNA, 38 nt, Artificial Sequence
  Description of Artificial Sequence:  Enzymatic Nucleic Acid
uggagaggcugaugaggccguuaggccgaaagcuugca

SEQ ID NO: 13212 - RNA, 38 nt, Artificial Sequence
  Description of Artificial Sequence:  Enzymatic Nucleic Acid
uagcuggacugaugaggccguuaggccgaaagggagcu

SEQ ID NO: 13213 - RNA, 38 nt, Artificial Sequence
  Description of Artificial Sequence:  Enzymatic Nucleic Acid
ccuagcugcugaugaggccguuaggccgaaagagggag

SEQ ID NO: 13214 - RNA, 38 nt, Artificial Sequence
  Description of Artificial Sequence:  Enzymatic Nucleic Acid
cugagucccugaugaggccguuaggccgaaagcuggag

SEQ ID NO: 13215 - RNA, 38 nt, Artificial Sequence
  Description of Artificial Sequence:  Enzymatic Nucleic Acid
aauauccucugaugaggccguuaggccgaaaguccuag

SEQ ID NO: 13216 - RNA, 38 nt, Artificial Sequence
  Description of Artificial Sequence:  Enzymatic Nucleic Acid
uugacuaacugaugaggccguuaggccgaaauccugag

SEQ ID NO: 13217 - RNA, 38 nt, Artificial Sequence
  Description of Artificial Sequence:  Enzymatic Nucleic Acid
cauugacucugaugaggccguuaggccgaaauauccug

SEQ ID NO: 13218 - RNA, 38 nt, Artificial Sequence
  Description of Artificial Sequence:  Enzymatic Nucleic Acid
ucauugaccugaugaggccguuaggccgaaaauauccu

SEQ ID NO: 13219 - RNA, 38 nt, Artificial Sequence
  Description of Artificial Sequence:  Enzymatic Nucleic Acid
uuccuuuucugaugaggccguuaggccgaaauggcuca

SEQ ID NO: 13220 - RNA, 38 nt, Artificial Sequence
  Description of Artificial Sequence:  Enzymatic Nucleic Acid
aaauaagacugaugaggccguuaggccgaaagguuuuu

SEQ ID NO: 13221 - RNA, 38 nt, Artificial Sequence
  Description of Artificial Sequence:  Enzymatic Nucleic Acid
gaaaauaacugaugaggccguuaggccgaaauagguuu

SEQ ID NO: 13222 - RNA, 38 nt, Artificial Sequence
  Description of Artificial Sequence:  Enzymatic Nucleic Acid
augaaaaucugaugaggccguuaggccgaaagauaggu

SEQ ID NO: 13223 - RNA, 38 nt, Artificial Sequence
  Description of Artificial Sequence:  Enzymatic Nucleic Acid
gaugaaaacugaugaggccguuaggccgaaaagauagg

SEQ ID NO: 13224 - RNA, 38 nt, Artificial Sequence
  Description of Artificial Sequence:  Enzymatic Nucleic Acid
cagaugaacugaugaggccguuaggccgaaauaagaua

SEQ ID NO: 13225 - RNA, 38 nt, Artificial Sequence
  Description of Artificial Sequence:  Enzymatic Nucleic Acid
acagaugacugaugaggccguuaggccgaaaauaagau

SEQ ID NO: 13226 - RNA, 38 nt, Artificial Sequence
  Description of Artificial Sequence:  Enzymatic Nucleic Acid
aacagaugcugaugaggccguuaggccgaaaaauaaga

SEQ ID NO: 13227 - RNA, 38 nt, Artificial Sequence
  Description of Artificial Sequence:  Enzymatic Nucleic Acid
aaacagaucugaugaggccguuaggccgaaaaaauaag

SEQ ID NO: 13228 - RNA, 38 nt, Artificial Sequence
  Description of Artificial Sequence:  Enzymatic Nucleic Acid
augaaacacugaugaggccguuaggccgaaaugaaaau

SEQ ID NO: 13229 - RNA, 38 nt, Artificial Sequence
  Description of Artificial Sequence:  Enzymatic Nucleic Acid
agguaugacugaugaggccguuaggccgaaacagauga

SEQ ID NO: 13230 - RNA, 38 nt, Artificial Sequence
  Description of Artificial Sequence:  Enzymatic Nucleic Acid
aagguaugcugaugaggccguuaggccgaaaacagaug

SEQ ID NO: 13231 - RNA, 38 nt, Artificial Sequence
  Description of Artificial Sequence:  Enzymatic Nucleic Acid
caagguaucugaugaggccguuaggccgaaaaacagau

SEQ ID NO: 13232 - RNA, 38 nt, Artificial Sequence
  Description of Artificial Sequence:  Enzymatic Nucleic Acid
agacaaggcugaugaggccguuaggccgaaaugaaaca

SEQ ID NO: 13233 - RNA, 38 nt, Artificial Sequence
  Description of Artificial Sequence:  Enzymatic Nucleic Acid
ccccagaccugaugaggccguuaggccgaaagguauga

SEQ ID NO: 13234 - RNA, 38 nt, Artificial Sequence
  Description of Artificial Sequence:  Enzymatic Nucleic Acid
agaccccacugaugaggccguuaggccgaaacaaggua

SEQ ID NO: 13235 - RNA, 38 nt, Artificial Sequence
  Description of Artificial Sequence:  Enzymatic Nucleic Acid
cgucauuacugaugaggccguuaggccgaaaccccaga

SEQ ID NO: 13236 - RNA, 38 nt, Artificial Sequence
  Description of Artificial Sequence:  Enzymatic Nucleic Acid
aucgucaucugaugaggccguuaggccgaaagacccca

SEQ ID NO: 13237 - RNA, 38 nt, Artificial Sequence
  Description of Artificial Sequence:  Enzymatic Nucleic Acid
cccauguccugaugaggccguuaggccgaaacccuguu

SEQ ID NO: 13238 - RNA, 38 nt, Artificial Sequence
  Description of Artificial Sequence:  Enzymatic Nucleic Acid
cccuuuuccugaugaggccguuaggccgaaacccuguc

SEQ ID NO: 13239 - RNA, 38 nt, Artificial Sequence
  Description of Artificial Sequence:  Enzymatic Nucleic Acid
accccaaacugaugaggccguuaggccgaaagcgggca

SEQ ID NO: 13240 - RNA, 38 nt, Artificial Sequence
  Description of Artificial Sequence:  Enzymatic Nucleic Acid
agaccccacugaugaggccguuaggccgaaagagcggg

SEQ ID NO: 13241 - RNA, 38 nt, Artificial Sequence
  Description of Artificial Sequence:  Enzymatic Nucleic Acid
uagacccccugaugaggccguuaggccgaaaagagcgg

SEQ ID NO: 13242 - RNA, 38 nt, Artificial Sequence
  Description of Artificial Sequence:  Enzymatic Nucleic Acid
caucucuacugaugaggccguuaggccgaaaccccaaa

SEQ ID NO: 13243 - RNA, 38 nt, Artificial Sequence
  Description of Artificial Sequence:  Enzymatic Nucleic Acid
cucaucuccugaugaggccguuaggccgaaagacccca

SEQ ID NO: 13244 - RNA, 38 nt, Artificial Sequence
  Description of Artificial Sequence:  Enzymatic Nucleic Acid
auuuuagacugaugaggccguuaggccgaaacccaggg

SEQ ID NO: 13245 - RNA, 38 nt, Artificial Sequence
  Description of Artificial Sequence:  Enzymatic Nucleic Acid
ccauuuuacugaugaggccguuaggccgaaagacccag

SEQ ID NO: 13246 - RNA, 38 nt, Artificial Sequence
  Description of Artificial Sequence:  Enzymatic Nucleic Acid
agccauuucugaugaggccguuaggccgaaagagaccc

SEQ ID NO: 13247 - RNA, 38 nt, Artificial Sequence
  Description of Artificial Sequence:  Enzymatic Nucleic Acid
uucuaagacugaugaggccguuaggccgaaagccauuu

SEQ ID NO: 13248 - RNA, 38 nt, Artificial Sequence
  Description of Artificial Sequence:  Enzymatic Nucleic Acid
acuucuaacugaugaggccguuaggccgaaagagccau

SEQ ID NO: 13249 - RNA, 38 nt, Artificial Sequence
  Description of Artificial Sequence:  Enzymatic Nucleic Acid
caacuucucugaugaggccguuaggccgaaagagagcc

SEQ ID NO: 13250 - RNA, 38 nt, Artificial Sequence
  Description of Artificial Sequence:  Enzymatic Nucleic Acid
acaacuuccugaugaggccguuaggccgaaaagagagc

SEQ ID NO: 13251 - RNA, 38 nt, Artificial Sequence
  Description of Artificial Sequence:  Enzymatic Nucleic Acid
gcacauaccugaugaggccguuaggccgaaacuucuaa

SEQ ID NO: 13252 - RNA, 38 nt, Artificial Sequence
  Description of Artificial Sequence:  Enzymatic Nucleic Acid
uuugcacacugaugaggccguuaggccgaaacaacuuc

SEQ ID NO: 13253 - RNA, 38 nt, Artificial Sequence
  Description of Artificial Sequence:  Enzymatic Nucleic Acid
cagaccaucugaugaggccguuaggccgaaauuugcac

SEQ ID NO: 13254 - RNA, 38 nt, Artificial Sequence
  Description of Artificial Sequence:  Enzymatic Nucleic Acid
acagaccacugaugaggccguuaggccgaaaauuugca

SEQ ID NO: 13255 - RNA, 38 nt, Artificial Sequence
  Description of Artificial Sequence:  Enzymatic Nucleic Acid
agcacacacugaugaggccguuaggccgaaaccauaau

SEQ ID NO: 13256 - RNA, 38 nt, Artificial Sequence
  Description of Artificial Sequence:  Enzymatic Nucleic Acid
cacgaccucugaugaggccguuaggccgaaagcacaca

SEQ ID NO: 13257 - RNA, 38 nt, Artificial Sequence
  Description of Artificial Sequence:  Enzymatic Nucleic Acid
gcacgacccugaugaggccguuaggccgaaaagcacac

SEQ ID NO: 13258 - RNA, 38 nt, Artificial Sequence
  Description of Artificial Sequence:  Enzymatic Nucleic Acid
gugugcaccugaugaggccguuaggccgaaaccuaagc

SEQ ID NO: 13259 - RNA, 38 nt, Artificial Sequence
  Description of Artificial Sequence:  Enzymatic Nucleic Acid
ccagcugucugaugaggccguuaggccgaaaccggcuc

SEQ ID NO: 13260 - RNA, 38 nt, Artificial Sequence
  Description of Artificial Sequence:  Enzymatic Nucleic Acid
aaagcagccugaugaggccguuaggccgaaauucaucg

SEQ ID NO: 13261 - RNA, 38 nt, Artificial Sequence
  Description of Artificial Sequence:  Enzymatic Nucleic Acid
cucucccacugaugaggccguuaggccgaaagcagcua

SEQ ID NO: 13262 - RNA, 38 nt, Artificial Sequence
  Description of Artificial Sequence:  Enzymatic Nucleic Acid
gcucuccccugaugaggccguuaggccgaaaagcagcu

SEQ ID NO: 13263 - RNA, 38 nt, Artificial Sequence
  Description of Artificial Sequence:  Enzymatic Nucleic Acid
uaaguggccugaugaggccguuaggccgaaagcaugcu

SEQ ID NO: 13264 - RNA, 38 nt, Artificial Sequence
  Description of Artificial Sequence:  Enzymatic Nucleic Acid
agagaauucugaugaggccguuaggccgaaaguggcua

SEQ ID NO: 13265 - RNA, 38 nt, Artificial Sequence
  Description of Artificial Sequence:  Enzymatic Nucleic Acid
cagagaaucugaugaggccguuaggccgaaaaguggcu

SEQ ID NO: 13266 - RNA, 38 nt, Artificial Sequence
  Description of Artificial Sequence:  Enzymatic Nucleic Acid
ggucagagcugaugaggccguuaggccgaaauuaagug

SEQ ID NO: 13267 - RNA, 38 nt, Artificial Sequence
  Description of Artificial Sequence:  Enzymatic Nucleic Acid
cggucagacugaugaggccguuaggccgaaaauuaagu

SEQ ID NO: 13268 - RNA, 38 nt, Artificial Sequence
  Description of Artificial Sequence:  Enzymatic Nucleic Acid
cccggucacugaugaggccguuaggccgaaagaauuaa

SEQ ID NO: 13269 - RNA, 38 nt, Artificial Sequence
  Description of Artificial Sequence:  Enzymatic Nucleic Acid
guacccaucugaugaggccguuaggccgaaaugcuggc

SEQ ID NO: 13270 - RNA, 38 nt, Artificial Sequence
  Description of Artificial Sequence:  Enzymatic Nucleic Acid
ggagcaggcugaugaggccguuaggccgaaacccauga

SEQ ID NO: 13271 - RNA, 38 nt, Artificial Sequence
  Description of Artificial Sequence:  Enzymatic Nucleic Acid
acacagggcugaugaggccguuaggccgaaagcaggua

SEQ ID NO: 13272 - RNA, 38 nt, Artificial Sequence
  Description of Artificial Sequence:  Enzymatic Nucleic Acid
ggauggggcugaugaggccguuaggccgaaacacaggg

SEQ ID NO: 13273 - RNA, 38 nt, Artificial Sequence
  Description of Artificial Sequence:  Enzymatic Nucleic Acid
accuuaagcugaugaggccguuaggccgaaauggggua

SEQ ID NO: 13274 - RNA, 38 nt, Artificial Sequence
  Description of Artificial Sequence:  Enzymatic Nucleic Acid
aaaaccuucugaugaggccguuaggccgaaaggauggg

SEQ ID NO: 13275 - RNA, 38 nt, Artificial Sequence
  Description of Artificial Sequence:  Enzymatic Nucleic Acid
gaaaaccucugaugaggccguuaggccgaaaaggaugg

SEQ ID NO: 13276 - RNA, 38 nt, Artificial Sequence
  Description of Artificial Sequence:  Enzymatic Nucleic Acid
agacagaacugaugaggccguuaggccgaaaccuuaag

SEQ ID NO: 13277 - RNA, 38 nt, Artificial Sequence
  Description of Artificial Sequence:  Enzymatic Nucleic Acid
cagacagacugaugaggccguuaggccgaaaaccuuaa

SEQ ID NO: 13278 - RNA, 38 nt, Artificial Sequence
  Description of Artificial Sequence:  Enzymatic Nucleic Acid
ucagacagcugaugaggccguuaggccgaaaaaccuua

SEQ ID NO: 13279 - RNA, 38 nt, Artificial Sequence
  Description of Artificial Sequence:  Enzymatic Nucleic Acid
aucagacacugaugaggccguuaggccgaaaaaaccuu

SEQ ID NO: 13280 - RNA, 38 nt, Artificial Sequence
  Description of Artificial Sequence:  Enzymatic Nucleic Acid
ucucaucacugaugaggccguuaggccgaaacagaaaa

SEQ ID NO: 13281 - RNA, 38 nt, Artificial Sequence
  Description of Artificial Sequence:  Enzymatic Nucleic Acid
ucagugggcugaugaggccguuaggccgaaauugcacu

SEQ ID NO: 13282 - RNA, 38 nt, Artificial Sequence
  Description of Artificial Sequence:  Enzymatic Nucleic Acid
ugcaccaacugaugaggccguuaggccgaaagccacag

SEQ ID NO: 13283 - RNA, 38 nt, Artificial Sequence
  Description of Artificial Sequence:  Enzymatic Nucleic Acid
agugcacccugaugaggccguuaggccgaaagagccac

SEQ ID NO: 13284 - RNA, 38 nt, Artificial Sequence
  Description of Artificial Sequence:  Enzymatic Nucleic Acid
uggcuggucugaugaggccguuaggccgaaagugcacc

SEQ ID NO: 13285 - RNA, 38 nt, Artificial Sequence
  Description of Artificial Sequence:  Enzymatic Nucleic Acid
uacuuguccugaugaggccguuaggccgaaaguccugg

SEQ ID NO: 13286 - RNA, 38 nt, Artificial Sequence
  Description of Artificial Sequence:  Enzymatic Nucleic Acid
cccuuucccugaugaggccguuaggccgaaacuugucu

SEQ ID NO: 13287 - RNA, 38 nt, Artificial Sequence
  Description of Artificial Sequence:  Enzymatic Nucleic Acid
guggcuagcugaugaggccguuaggccgaaagcccuuu

SEQ ID NO: 13288 - RNA, 38 nt, Artificial Sequence
  Description of Artificial Sequence:  Enzymatic Nucleic Acid
uguggcuacugaugaggccguuaggccgaaaagcccuu

SEQ ID NO: 13289 - RNA, 38 nt, Artificial Sequence
  Description of Artificial Sequence:  Enzymatic Nucleic Acid
aguguggccugaugaggccguuaggccgaaagaagccc

SEQ ID NO: 13290 - RNA, 38 nt, Artificial Sequence
  Description of Artificial Sequence:  Enzymatic Nucleic Acid
cccuaccucugaugaggccguuaggccgaaauuuucuu

SEQ ID NO: 13291 - RNA, 38 nt, Artificial Sequence
  Description of Artificial Sequence:  Enzymatic Nucleic Acid
gccagccccugaugaggccguuaggccgaaaccugauu

SEQ ID NO: 13292 - RNA, 38 nt, Artificial Sequence
  Description of Artificial Sequence:  Enzymatic Nucleic Acid
uggacaaacugaugaggccguuaggccgaaaugucuuu

SEQ ID NO: 13293 - RNA, 38 nt, Artificial Sequence
  Description of Artificial Sequence:  Enzymatic Nucleic Acid
aauggacacugaugaggccguuaggccgaaagaugucu

SEQ ID NO: 13294 - RNA, 38 nt, Artificial Sequence
  Description of Artificial Sequence:  Enzymatic Nucleic Acid
gaauggaccugaugaggccguuaggccgaaaagauguc

SEQ ID NO: 13295 - RNA, 38 nt, Artificial Sequence
  Description of Artificial Sequence:  Enzymatic Nucleic Acid
ugcgaaugcugaugaggccguuaggccgaaacaaagau

SEQ ID NO: 13296 - RNA, 38 nt, Artificial Sequence
  Description of Artificial Sequence:  Enzymatic Nucleic Acid
cuuuugcgcugaugaggccguuaggccgaaauggacaa

SEQ ID NO: 13297 - RNA, 38 nt, Artificial Sequence
  Description of Artificial Sequence:  Enzymatic Nucleic Acid
gcuuuugccugaugaggccguuaggccgaaaauggaca

SEQ ID NO: 13298 - RNA, 38 nt, Artificial Sequence
  Description of Artificial Sequence:  Enzymatic Nucleic Acid
gccgacaacugaugaggccguuaggccgaaagcuuuug

SEQ ID NO: 13299 - RNA, 38 nt, Artificial Sequence
  Description of Artificial Sequence:  Enzymatic Nucleic Acid
cagccgaccugaugaggccguuaggccgaaagagcuuu

SEQ ID NO: 13300 - RNA, 38 nt, Artificial Sequence
  Description of Artificial Sequence:  Enzymatic Nucleic Acid
cugcagcccugaugaggccguuaggccgaaacaagagc

SEQ ID NO: 13301 - RNA, 38 nt, Artificial Sequence
  Description of Artificial Sequence:  Enzymatic Nucleic Acid
gccugacucugaugaggccguuaggccgaaacacacug

SEQ ID NO: 13302 - RNA, 38 nt, Artificial Sequence
  Description of Artificial Sequence:  Enzymatic Nucleic Acid
caucgccucugaugaggccguuaggccgaaacuuacac

SEQ ID NO: 13303 - RNA, 38 nt, Artificial Sequence
  Description of Artificial Sequence:  Enzymatic Nucleic Acid
uucucuggcugaugaggccguuaggccgaaagccucug

SEQ ID NO: 13304 - RNA, 38 nt, Artificial Sequence
  Description of Artificial Sequence:  Enzymatic Nucleic Acid
ggaugagacugaugaggccguuaggccgaaaccucagg

SEQ ID NO: 13305 - RNA, 38 nt, Artificial Sequence
  Description of Artificial Sequence:  Enzymatic Nucleic Acid
uggaugagcugaugaggccguuaggccgaaaaccucag

SEQ ID NO: 13306 - RNA, 38 nt, Artificial Sequence
  Description of Artificial Sequence:  Enzymatic Nucleic Acid
cuggaugacugaugaggccguuaggccgaaaaaccuca

SEQ ID NO: 13307 - RNA, 38 nt, Artificial Sequence
  Description of Artificial Sequence:  Enzymatic Nucleic Acid
aucuggaucugaugaggccguuaggccgaaagaaaccu

SEQ ID NO: 13308 - RNA, 38 nt, Artificial Sequence
  Description of Artificial Sequence:  Enzymatic Nucleic Acid
gauaucugcugaugaggccguuaggccgaaaugagaaa

SEQ ID NO: 13309 - RNA, 38 nt, Artificial Sequence
  Description of Artificial Sequence:  Enzymatic Nucleic Acid
uugcuggacugaugaggccguuaggccgaaaucuggau

SEQ ID NO: 13310 - RNA, 38 nt, Artificial Sequence
  Description of Artificial Sequence:  Enzymatic Nucleic Acid
aauugcugcugaugaggccguuaggccgaaauaucugg

SEQ ID NO: 13311 - RNA, 38 nt, Artificial Sequence
  Description of Artificial Sequence:  Enzymatic Nucleic Acid
cacccccccugaugaggccguuaggccgaaauugcugg

SEQ ID NO: 13312 - RNA, 38 nt, Artificial Sequence
  Description of Artificial Sequence:  Enzymatic Nucleic Acid
ggaccauccugaugaggccguuaggccgaaauggucuu

SEQ ID NO: 13313 - RNA, 38 nt, Artificial Sequence
  Description of Artificial Sequence:  Enzymatic Nucleic Acid
uaauacagcugaugaggccguuaggccgaaaccaucua

SEQ ID NO: 13314 - RNA, 38 nt, Artificial Sequence
  Description of Artificial Sequence:  Enzymatic Nucleic Acid
cggaauaacugaugaggccguuaggccgaaacaggacc

SEQ ID NO: 13315 - RNA, 38 nt, Artificial Sequence
  Description of Artificial Sequence:  Enzymatic Nucleic Acid
aucggaaucugaugaggccguuaggccgaaauacagga

SEQ ID NO: 13316 - RNA, 38 nt, Artificial Sequence
  Description of Artificial Sequence:  Enzymatic Nucleic Acid
aaucggaacugaugaggccguuaggccgaaaauacagg

SEQ ID NO: 13317 - RNA, 38 nt, Artificial Sequence
  Description of Artificial Sequence:  Enzymatic Nucleic Acid
aaaaucggcugaugaggccguuaggccgaaauaauaca

SEQ ID NO: 13318 - RNA, 38 nt, Artificial Sequence
  Description of Artificial Sequence:  Enzymatic Nucleic Acid
uaaaaucgcugaugaggccguuaggccgaaaauaauac

SEQ ID NO: 13319 - RNA, 38 nt, Artificial Sequence
  Description of Artificial Sequence:  Enzymatic Nucleic Acid
auuauuaacugaugaggccguuaggccgaaaucggaau

SEQ ID NO: 13320 - RNA, 38 nt, Artificial Sequence
  Description of Artificial Sequence:  Enzymatic Nucleic Acid
gauuauuacugaugaggccguuaggccgaaaaucggaa

SEQ ID NO: 13321 - RNA, 38 nt, Artificial Sequence
  Description of Artificial Sequence:  Enzymatic Nucleic Acid
agauuauucugaugaggccguuaggccgaaaaaucgga

SEQ ID NO: 13322 - RNA, 38 nt, Artificial Sequence
  Description of Artificial Sequence:  Enzymatic Nucleic Acid
uagauuaucugaugaggccguuaggccgaaaaaaucgg

SEQ ID NO: 13323 - RNA, 38 nt, Artificial Sequence
  Description of Artificial Sequence:  Enzymatic Nucleic Acid
aauuagaucugaugaggccguuaggccgaaauuaaaau

SEQ ID NO: 13324 - RNA, 38 nt, Artificial Sequence
  Description of Artificial Sequence:  Enzymatic Nucleic Acid
acgaauuacugaugaggccguuaggccgaaauuauuaa

SEQ ID NO: 13325 - RNA, 38 nt, Artificial Sequence
  Description of Artificial Sequence:  Enzymatic Nucleic Acid
ucacgaaucugaugaggccguuaggccgaaagauuauu

SEQ ID NO: 13326 - RNA, 38 nt, Artificial Sequence
  Description of Artificial Sequence:  Enzymatic Nucleic Acid
ugaucacgcugaugaggccguuaggccgaaauuagauu

SEQ ID NO: 13327 - RNA, 38 nt, Artificial Sequence
  Description of Artificial Sequence:  Enzymatic Nucleic Acid
augaucaccugaugaggccguuaggccgaaaauuagau

SEQ ID NO: 13328 - RNA, 38 nt, Artificial Sequence
  Description of Artificial Sequence:  Enzymatic Nucleic Acid
cucuuaaucugaugaggccguuaggccgaaaucacgaa

SEQ ID NO: 13329 - RNA, 38 nt, Artificial Sequence
  Description of Artificial Sequence:  Enzymatic Nucleic Acid
agucucuucugaugaggccguuaggccgaaaugaucac

SEQ ID NO: 13330 - RNA, 38 nt, Artificial Sequence
  Description of Artificial Sequence:  Enzymatic Nucleic Acid
aagucucucugaugaggccguuaggccgaaaaugauca

SEQ ID NO: 13331 - RNA, 38 nt, Artificial Sequence
  Description of Artificial Sequence:  Enzymatic Nucleic Acid
auuuacuacugaugaggccguuaggccgaaagucucuu

SEQ ID NO: 13332 - RNA, 38 nt, Artificial Sequence
  Description of Artificial Sequence:  Enzymatic Nucleic Acid
cauuuacucugaugaggccguuaggccgaaaagucucu

SEQ ID NO: 13333 - RNA, 38 nt, Artificial Sequence
  Description of Artificial Sequence:  Enzymatic Nucleic Acid
acauuuaccugaugaggccguuaggccgaaaaagucuc

SEQ ID NO: 13334 - RNA, 38 nt, Artificial Sequence
  Description of Artificial Sequence:  Enzymatic Nucleic Acid
gggacauucugaugaggccguuaggccgaaacuaaagu

SEQ ID NO: 13335 - RNA, 38 nt, Artificial Sequence
  Description of Artificial Sequence:  Enzymatic Nucleic Acid
ggaaaaggcugaugaggccguuaggccgaaacauuuac

SEQ ID NO: 13336 - RNA, 38 nt, Artificial Sequence
  Description of Artificial Sequence:  Enzymatic Nucleic Acid
ugugggaacugaugaggccguuaggccgaaagggacau

SEQ ID NO: 13337 - RNA, 38 nt, Artificial Sequence
  Description of Artificial Sequence:  Enzymatic Nucleic Acid
uugugggacugaugaggccguuaggccgaaaagggaca

SEQ ID NO: 13338 - RNA, 38 nt, Artificial Sequence
  Description of Artificial Sequence:  Enzymatic Nucleic Acid
uuugugggcugaugaggccguuaggccgaaaaagggac

SEQ ID NO: 13339 - RNA, 38 nt, Artificial Sequence
  Description of Artificial Sequence:  Enzymatic Nucleic Acid
uuuuguggcugaugaggccguuaggccgaaaaaaggga

SEQ ID NO: 13340 - RNA, 38 nt, Artificial Sequence
  Description of Artificial Sequence:  Enzymatic Nucleic Acid
cuuuucuucugaugaggccguuaggccgaaacuuuugu

SEQ ID NO: 13341 - RNA, 38 nt, Artificial Sequence
  Description of Artificial Sequence:  Enzymatic Nucleic Acid
aaucccgacugaugaggccguuaggccgaaagcuuuuc

SEQ ID NO: 13342 - RNA, 38 nt, Artificial Sequence
  Description of Artificial Sequence:  Enzymatic Nucleic Acid
agaauccccugaugaggccguuaggccgaaauagcuuu

SEQ ID NO: 13343 - RNA, 38 nt, Artificial Sequence
  Description of Artificial Sequence:  Enzymatic Nucleic Acid
aaccagagcugaugaggccguuaggccgaaaucccgau

SEQ ID NO: 13344 - RNA, 38 nt, Artificial Sequence
  Description of Artificial Sequence:  Enzymatic Nucleic Acid
gaaccagacugaugaggccguuaggccgaaaaucccga

SEQ ID NO: 13345 - RNA, 38 nt, Artificial Sequence
  Description of Artificial Sequence:  Enzymatic Nucleic Acid
cagaaccacugaugaggccguuaggccgaaagaauccc

SEQ ID NO: 13346 - RNA, 38 nt, Artificial Sequence
  Description of Artificial Sequence:  Enzymatic Nucleic Acid
uuaagcagcugaugaggccguuaggccgaaaccagaga

SEQ ID NO: 13347 - RNA, 38 nt, Artificial Sequence
  Description of Artificial Sequence:  Enzymatic Nucleic Acid
uuuaagcacugaugaggccguuaggccgaaaaccagag

SEQ ID NO: 13348 - RNA, 38 nt, Artificial Sequence
  Description of Artificial Sequence:  Enzymatic Nucleic Acid
aagucuuucugaugaggccguuaggccgaaagcagaac

SEQ ID NO: 13349 - RNA, 38 nt, Artificial Sequence
  Description of Artificial Sequence:  Enzymatic Nucleic Acid
uaagucuucugaugaggccguuaggccgaaaagcagaa

SEQ ID NO: 13350 - RNA, 38 nt, Artificial Sequence
  Description of Artificial Sequence:  Enzymatic Nucleic Acid
ccaaagcucugaugaggccguuaggccgaaagucuuua

SEQ ID NO: 13351 - RNA, 38 nt, Artificial Sequence
  Description of Artificial Sequence:  Enzymatic Nucleic Acid
uccaaagccugaugaggccguuaggccgaaaagucuuu

SEQ ID NO: 13352 - RNA, 38 nt, Artificial Sequence
  Description of Artificial Sequence:  Enzymatic Nucleic Acid
aggcuccacugaugaggccguuaggccgaaagcuaagu

SEQ ID NO: 13353 - RNA, 38 nt, Artificial Sequence
  Description of Artificial Sequence:  Enzymatic Nucleic Acid
uaggcucccugaugaggccguuaggccgaaaagcuaag

SEQ ID NO: 13354 - RNA, 38 nt, Artificial Sequence
  Description of Artificial Sequence:  Enzymatic Nucleic Acid
aacuuucacugaugaggccguuaggccgaaaggcucca

SEQ ID NO: 13355 - RNA, 38 nt, Artificial Sequence
  Description of Artificial Sequence:  Enzymatic Nucleic Acid
ggcugauccugaugaggccguuaggccgaaacuuucau

SEQ ID NO: 13356 - RNA, 54 nt, Artificial Sequence
  Description of Artificial Sequence:  Enzymatic Nucleic Acid
gucccagcagaagaccauaccagagaaacacacguugugguacauuaccuggua

SEQ ID NO: 13357 - RNA, 54 nt, Artificial Sequence
  Description of Artificial Sequence:  Enzymatic Nucleic Acid
ggugucccagaagcugacaccagagaaacacacguugugguacauuaccuggua

SEQ ID NO: 13358 - RNA, 54 nt, Artificial Sequence
  Description of Artificial Sequence:  Enzymatic Nucleic Acid
uaaggcaaagaagcggugaccagagaaacacacguugugguacauuaccuggua

SEQ ID NO: 13359 - RNA, 54 nt, Artificial Sequence
  Description of Artificial Sequence:  Enzymatic Nucleic Acid
gacacccgagaagcgcguaccagagaaacacacguugugguacauuaccuggua

SEQ ID NO: 13360 - RNA, 54 nt, Artificial Sequence
  Description of Artificial Sequence:  Enzymatic Nucleic Acid
cugugagaagaagacaccaccagagaaacacacguugugguacauuaccuggua

SEQ ID NO: 13361 - RNA, 54 nt, Artificial Sequence
  Description of Artificial Sequence:  Enzymatic Nucleic Acid
gaaagagaagaaggccugaccagagaaacacacguugugguacauuaccuggua

SEQ ID NO: 13362 - RNA, 54 nt, Artificial Sequence
  Description of Artificial Sequence:  Enzymatic Nucleic Acid
caugagugagaagccuccaccagagaaacacacguugugguacauuaccuggua

SEQ ID NO: 13363 - RNA, 54 nt, Artificial Sequence
  Description of Artificial Sequence:  Enzymatic Nucleic Acid
cggucgugagaagagaccaccagagaaacacacguugugguacauuaccuggua

SEQ ID NO: 13364 - RNA, 54 nt, Artificial Sequence
  Description of Artificial Sequence:  Enzymatic Nucleic Acid
cucccacaagaagaugggaccagagaaacacacguugugguacauuaccuggua

SEQ ID NO: 13365 - RNA, 54 nt, Artificial Sequence
  Description of Artificial Sequence:  Enzymatic Nucleic Acid
ggaugaugagaagucuucaccagagaaacacacguugugguacauuaccuggua

SEQ ID NO: 13366 - RNA, 54 nt, Artificial Sequence
  Description of Artificial Sequence:  Enzymatic Nucleic Acid
cgucacccagaaggggauaccagagaaacacacguugugguacauuaccuggua

SEQ ID NO: 13367 - RNA, 54 nt, Artificial Sequence
  Description of Artificial Sequence:  Enzymatic Nucleic Acid
cuuugcccagaagggguaaccagagaaacacacguugugguacauuaccuggua

SEQ ID NO: 13368 - RNA, 54 nt, Artificial Sequence
  Description of Artificial Sequence:  Enzymatic Nucleic Acid
cgcaguucagaaguccuaaccagagaaacacacguugugguacauuaccuggua

SEQ ID NO: 13369 - RNA, 54 nt, Artificial Sequence
  Description of Artificial Sequence:  Enzymatic Nucleic Acid
gccgauggagaagauaguaccagagaaacacacguugugguacauuaccuggua

SEQ ID NO: 13370 - RNA, 54 nt, Artificial Sequence
  Description of Artificial Sequence:  Enzymatic Nucleic Acid
uuguauugagaagccgauaccagagaaacacacguugugguacauuaccuggua

SEQ ID NO: 13371 - RNA, 54 nt, Artificial Sequence
  Description of Artificial Sequence:  Enzymatic Nucleic Acid
cugggcucagaaggcguaaccagagaaacacacguugugguacauuaccuggua

SEQ ID NO: 13372 - RNA, 54 nt, Artificial Sequence
  Description of Artificial Sequence:  Enzymatic Nucleic Acid
gcccguggagaagucucaaccagagaaacacacguugugguacauuaccuggua

SEQ ID NO: 13373 - RNA, 54 nt, Artificial Sequence
  Description of Artificial Sequence:  Enzymatic Nucleic Acid
ggacaagaagaagcccguaccagagaaacacacguugugguacauuaccuggua

SEQ ID NO: 13374 - RNA, 54 nt, Artificial Sequence
  Description of Artificial Sequence:  Enzymatic Nucleic Acid
uccggucaagaagcugccaccagagaaacacacguugugguacauuaccuggua

SEQ ID NO: 13375 - RNA, 54 nt, Artificial Sequence
  Description of Artificial Sequence:  Enzymatic Nucleic Acid
cuucacgcagaagguguaaccagagaaacacacguugugguacauuaccuggua

SEQ ID NO: 13376 - RNA, 54 nt, Artificial Sequence
  Description of Artificial Sequence:  Enzymatic Nucleic Acid
uguugaaaagaaggaacgaccagagaaacacacguugugguacauuaccuggua

SEQ ID NO: 13377 - RNA, 54 nt, Artificial Sequence
  Description of Artificial Sequence:  Enzymatic Nucleic Acid
ccugcaccagaagcuuccaccagagaaacacacguugugguacauuaccuggua

SEQ ID NO: 13378 - RNA, 54 nt, Artificial Sequence
  Description of Artificial Sequence:  Enzymatic Nucleic Acid
gccgauagagaagucuucaccagagaaacacacguugugguacauuaccuggua

SEQ ID NO: 13379 - RNA, 54 nt, Artificial Sequence
  Description of Artificial Sequence:  Enzymatic Nucleic Acid
ucauggacagaagauaggaccagagaaacacacguugugguacauuaccuggua

SEQ ID NO: 13380 - RNA, 54 nt, Artificial Sequence
  Description of Artificial Sequence:  Enzymatic Nucleic Acid
cuuucaugagaagccgauaccagagaaacacacguugugguacauuaccuggua

SEQ ID NO: 13381 - RNA, 54 nt, Artificial Sequence
  Description of Artificial Sequence:  Enzymatic Nucleic Acid
aaauagcgagaagacuucaccagagaaacacacguugugguacauuaccuggua

SEQ ID NO: 13382 - RNA, 54 nt, Artificial Sequence
  Description of Artificial Sequence:  Enzymatic Nucleic Acid
uuucguagagaagagguuaccagagaaacacacguugugguacauuaccuggua

SEQ ID NO: 13383 - RNA, 54 nt, Artificial Sequence
  Description of Artificial Sequence:  Enzymatic Nucleic Acid
ugcugcccagaagauagaaccagagaaacacacguugugguacauuaccuggua

SEQ ID NO: 13384 - RNA, 54 nt, Artificial Sequence
  Description of Artificial Sequence:  Enzymatic Nucleic Acid
gucugagaagaagccaccaccagagaaacacacguugugguacauuaccuggua

SEQ ID NO: 13385 - RNA, 54 nt, Artificial Sequence
  Description of Artificial Sequence:  Enzymatic Nucleic Acid
uuccagggagaagagaguaccagagaaacacacguugugguacauuaccuggua

SEQ ID NO: 13386 - RNA, 54 nt, Artificial Sequence
  Description of Artificial Sequence:  Enzymatic Nucleic Acid
ggcccggcagaaguagauaccagagaaacacacguugugguacauuaccuggua

SEQ ID NO: 13387 - RNA, 54 nt, Artificial Sequence
  Description of Artificial Sequence:  Enzymatic Nucleic Acid
gaaggcccagaagcuguaaccagagaaacacacguugugguacauuaccuggua

SEQ ID NO: 13388 - RNA, 54 nt, Artificial Sequence
  Description of Artificial Sequence:  Enzymatic Nucleic Acid
uucggcacagaagugacaaccagagaaacacacguugugguacauuaccuggua

SEQ ID NO: 13389 - RNA, 54 nt, Artificial Sequence
  Description of Artificial Sequence:  Enzymatic Nucleic Acid
ucuccuucagaaggcaucaccagagaaacacacguugugguacauuaccuggua

SEQ ID NO: 13390 - RNA, 54 nt, Artificial Sequence
  Description of Artificial Sequence:  Enzymatic Nucleic Acid
ccacacagagaaguuucaaccagagaaacacacguugugguacauuaccuggua

SEQ ID NO: 13391 - RNA, 54 nt, Artificial Sequence
  Description of Artificial Sequence:  Enzymatic Nucleic Acid
gguuuugaagaaggugugaccagagaaacacacguugugguacauuaccuggua

SEQ ID NO: 13392 - RNA, 54 nt, Artificial Sequence
  Description of Artificial Sequence:  Enzymatic Nucleic Acid
accaagugagaagaggcgaccagagaaacacacguugugguacauuaccuggua

SEQ ID NO: 13393 - RNA, 54 nt, Artificial Sequence
  Description of Artificial Sequence:  Enzymatic Nucleic Acid
gugagguaagaagcgcuuaccagagaaacacacguugugguacauuaccuggua

SEQ ID NO: 13394 - RNA, 54 nt, Artificial Sequence
  Description of Artificial Sequence:  Enzymatic Nucleic Acid
ugagcgugagaagcuccaaccagagaaacacacguugugguacauuaccuggua

SEQ ID NO: 13395 - RNA, 54 nt, Artificial Sequence
  Description of Artificial Sequence:  Enzymatic Nucleic Acid
cggaagaaagaagcuucaaccagagaaacacacguugugguacauuaccuggua

SEQ ID NO: 13396 - RNA, 54 nt, Artificial Sequence
  Description of Artificial Sequence:  Enzymatic Nucleic Acid
gacagguaagaagucuuuaccagagaaacacacguugugguacauuaccuggua

SEQ ID NO: 13397 - RNA, 54 nt, Artificial Sequence
  Description of Artificial Sequence:  Enzymatic Nucleic Acid
cauagggcagaaguucacaccagagaaacacacguugugguacauuaccuggua

SEQ ID NO: 13398 - RNA, 54 nt, Artificial Sequence
  Description of Artificial Sequence:  Enzymatic Nucleic Acid
caucauagagaagccguuaccagagaaacacacguugugguacauuaccuggua

SEQ ID NO: 13399 - RNA, 54 nt, Artificial Sequence
  Description of Artificial Sequence:  Enzymatic Nucleic Acid
cacaguccagaaggugggaccagagaaacacacguugugguacauuaccuggua

SEQ ID NO: 13400 - RNA, 54 nt, Artificial Sequence
  Description of Artificial Sequence:  Enzymatic Nucleic Acid
cagccacaagaaggcaggaccagagaaacacacguugugguacauuaccuggua

SEQ ID NO: 13401 - RNA, 54 nt, Artificial Sequence
  Description of Artificial Sequence:  Enzymatic Nucleic Acid
guucggucagaagagcuuaccagagaaacacacguugugguacauuaccuggua

SEQ ID NO: 13402 - RNA, 54 nt, Artificial Sequence
  Description of Artificial Sequence:  Enzymatic Nucleic Acid
cgaucaccagaagaggccaccagagaaacacacguugugguacauuaccuggua

SEQ ID NO: 13403 - RNA, 54 nt, Artificial Sequence
  Description of Artificial Sequence:  Enzymatic Nucleic Acid
gguaguugagaagguuucaccagagaaacacacguugugguacauuaccuggua

SEQ ID NO: 13404 - RNA, 54 nt, Artificial Sequence
  Description of Artificial Sequence:  Enzymatic Nucleic Acid
cuuguugaagaagaauaaaccagagaaacacacguugugguacauuaccuggua

SEQ ID NO: 13405 - RNA, 54 nt, Artificial Sequence
  Description of Artificial Sequence:  Enzymatic Nucleic Acid
auaugcaaagaagcguccaccagagaaacacacguugugguacauuaccuggua

SEQ ID NO: 13406 - RNA, 54 nt, Artificial Sequence
  Description of Artificial Sequence:  Enzymatic Nucleic Acid
acugucuaagaagggcuuaccagagaaacacacguugugguacauuaccuggua

SEQ ID NO: 13407 - RNA, 54 nt, Artificial Sequence
  Description of Artificial Sequence:  Enzymatic Nucleic Acid
gacacuugagaagcugacaccagagaaacacacguugugguacauuaccuggua

SEQ ID NO: 13408 - RNA, 54 nt, Artificial Sequence
  Description of Artificial Sequence:  Enzymatic Nucleic Acid
gaagcuggagaaggugacaccagagaaacacacguugugguacauuaccuggua

SEQ ID NO: 13409 - RNA, 54 nt, Artificial Sequence
  Description of Artificial Sequence:  Enzymatic Nucleic Acid
uucagggaagaaggagcuaccagagaaacacacguugugguacauuaccuggua

SEQ ID NO: 13410 - RNA, 54 nt, Artificial Sequence
  Description of Artificial Sequence:  Enzymatic Nucleic Acid
uggugaggagaagcuuggaccagagaaacacacguugugguacauuaccuggua

SEQ ID NO: 13411 - RNA, 54 nt, Artificial Sequence
  Description of Artificial Sequence:  Enzymatic Nucleic Acid
uguaggaaagaaggucuuaccagagaaacacacguugugguacauuaccuggua

SEQ ID NO: 13412 - RNA, 54 nt, Artificial Sequence
  Description of Artificial Sequence:  Enzymatic Nucleic Acid
cacuuggaagaaguaggaaccagagaaacacacguugugguacauuaccuggua

SEQ ID NO: 13413 - RNA, 54 nt, Artificial Sequence
  Description of Artificial Sequence:  Enzymatic Nucleic Acid
uucuggagagaagaaacuaccagagaaacacacguugugguacauuaccuggua

SEQ ID NO: 13414 - RNA, 54 nt, Artificial Sequence
  Description of Artificial Sequence:  Enzymatic Nucleic Acid
cuucaggcagaagcagaaaccagagaaacacacguugugguacauuaccuggua

SEQ ID NO: 13415 - RNA, 54 nt, Artificial Sequence
  Description of Artificial Sequence:  Enzymatic Nucleic Acid
uuccuucaagaagcugcaaccagagaaacacacguugugguacauuaccuggua

SEQ ID NO: 13416 - RNA, 54 nt, Artificial Sequence
  Description of Artificial Sequence:  Enzymatic Nucleic Acid
ggguucucagaagcaugcaccagagaaacacacguugugguacauuaccuggua

SEQ ID NO: 13417 - RNA, 54 nt, Artificial Sequence
  Description of Artificial Sequence:  Enzymatic Nucleic Acid
guucagcaagaaggggccaccagagaaacacacguugugguacauuaccuggua

SEQ ID NO: 13418 - RNA, 54 nt, Artificial Sequence
  Description of Artificial Sequence:  Enzymatic Nucleic Acid
uggcuugaagaaggucacaccagagaaacacacguugugguacauuaccuggua

SEQ ID NO: 13419 - RNA, 54 nt, Artificial Sequence
  Description of Artificial Sequence:  Enzymatic Nucleic Acid
uguuucuaagaaguauggaccagagaaacacacguugugguacauuaccuggua

SEQ ID NO: 13420 - RNA, 54 nt, Artificial Sequence
  Description of Artificial Sequence:  Enzymatic Nucleic Acid
aucugcaaagaaguccuuaccagagaaacacacguugugguacauuaccuggua

SEQ ID NO: 13421 - RNA, 54 nt, Artificial Sequence
  Description of Artificial Sequence:  Enzymatic Nucleic Acid
aaauguggagaagcaaagaccagagaaacacacguugugguacauuaccuggua

SEQ ID NO: 13422 - RNA, 54 nt, Artificial Sequence
  Description of Artificial Sequence:  Enzymatic Nucleic Acid
cucacaucagaagagcuuaccagagaaacacacguugugguacauuaccuggua

SEQ ID NO: 13423 - RNA, 54 nt, Artificial Sequence
  Description of Artificial Sequence:  Enzymatic Nucleic Acid
uaguguccagaagauaguaccagagaaacacacguugugguacauuaccuggua

SEQ ID NO: 13424 - RNA, 54 nt, Artificial Sequence
  Description of Artificial Sequence:  Enzymatic Nucleic Acid
gggagcccagaagagugcaccagagaaacacacguugugguacauuaccuggua

SEQ ID NO: 13425 - RNA, 54 nt, Artificial Sequence
  Description of Artificial Sequence:  Enzymatic Nucleic Acid
uccaggugagaagcuucaaccagagaaacacacguugugguacauuaccuggua

SEQ ID NO: 13426 - RNA, 54 nt, Artificial Sequence
  Description of Artificial Sequence:  Enzymatic Nucleic Acid
cucggcagagaagaaaguaccagagaaacacacguugugguacauuaccuggua

SEQ ID NO: 13427 - RNA, 54 nt, Artificial Sequence
  Description of Artificial Sequence:  Enzymatic Nucleic Acid
ugggccucagaagaucggaccagagaaacacacguugugguacauuaccuggua

SEQ ID NO: 13428 - RNA, 54 nt, Artificial Sequence
  Description of Artificial Sequence:  Enzymatic Nucleic Acid
gaagcagaagaagggccuaccagagaaacacacguugugguacauuaccuggua

SEQ ID NO: 13429 - RNA, 54 nt, Artificial Sequence
  Description of Artificial Sequence:  Enzymatic Nucleic Acid
gcuggagaagaagaagcuaccagagaaacacacguugugguacauuaccuggua

SEQ ID NO: 13430 - RNA, 54 nt, Artificial Sequence
  Description of Artificial Sequence:  Enzymatic Nucleic Acid
guggccacagaaggagaaaccagagaaacacacguugugguacauuaccuggua

SEQ ID NO: 13431 - RNA, 54 nt, Artificial Sequence
  Description of Artificial Sequence:  Enzymatic Nucleic Acid
uggagaacagaaggacucaccagagaaacacacguugugguacauuaccuggua

SEQ ID NO: 13432 - RNA, 54 nt, Artificial Sequence
  Description of Artificial Sequence:  Enzymatic Nucleic Acid
ggguggagagaagcaggaaccagagaaacacacguugugguacauuaccuggua

SEQ ID NO: 13433 - RNA, 54 nt, Artificial Sequence
  Description of Artificial Sequence:  Enzymatic Nucleic Acid
gaguuguaagaaggggguaccagagaaacacacguugugguacauuaccuggua

SEQ ID NO: 13434 - RNA, 54 nt, Artificial Sequence
  Description of Artificial Sequence:  Enzymatic Nucleic Acid
uuuaggcgagaagggaggaccagagaaacacacguugugguacauuaccuggua

SEQ ID NO: 13435 - RNA, 54 nt, Artificial Sequence
  Description of Artificial Sequence:  Enzymatic Nucleic Acid
aagcuuuaagaaggcgggaccagagaaacacacguugugguacauuaccuggua

SEQ ID NO: 13436 - RNA, 54 nt, Artificial Sequence
  Description of Artificial Sequence:  Enzymatic Nucleic Acid
guugucggagaaggugagaccagagaaacacacguugugguacauuaccuggua

SEQ ID NO: 13437 - RNA, 54 nt, Artificial Sequence
  Description of Artificial Sequence:  Enzymatic Nucleic Acid
cugucaggagaagguuguaccagagaaacacacguugugguacauuaccuggua

SEQ ID NO: 13438 - RNA, 54 nt, Artificial Sequence
  Description of Artificial Sequence:  Enzymatic Nucleic Acid
uccuguggagaagaauagaccagagaaacacacguugugguacauuaccuggua

SEQ ID NO: 13439 - RNA, 54 nt, Artificial Sequence
  Description of Artificial Sequence:  Enzymatic Nucleic Acid
cgaaaagcagaaggcuccaccagagaaacacacguugugguacauuaccuggua

SEQ ID NO: 13440 - RNA, 54 nt, Artificial Sequence
  Description of Artificial Sequence:  Enzymatic Nucleic Acid
ucacgaaaagaagcuggcaccagagaaacacacguugugguacauuaccuggua

SEQ ID NO: 13441 - RNA, 54 nt, Artificial Sequence
  Description of Artificial Sequence:  Enzymatic Nucleic Acid
uuagucaaagaagcaacaaccagagaaacacacguugugguacauuaccuggua

SEQ ID NO: 13442 - RNA, 54 nt, Artificial Sequence
  Description of Artificial Sequence:  Enzymatic Nucleic Acid
ggugggcgagaagucgccaccagagaaacacacguugugguacauuaccuggua

SEQ ID NO: 13443 - RNA, 54 nt, Artificial Sequence
  Description of Artificial Sequence:  Enzymatic Nucleic Acid
ggccggugagaaggcgguaccagagaaacacacguugugguacauuaccuggua

SEQ ID NO: 13444 - RNA, 54 nt, Artificial Sequence
  Description of Artificial Sequence:  Enzymatic Nucleic Acid
agucccacagaagcagggaccagagaaacacacguugugguacauuaccuggua

SEQ ID NO: 13445 - RNA, 54 nt, Artificial Sequence
  Description of Artificial Sequence:  Enzymatic Nucleic Acid
cagagcagagaagugcauaccagagaaacacacguugugguacauuaccuggua

SEQ ID NO: 13446 - RNA, 54 nt, Artificial Sequence
  Description of Artificial Sequence:  Enzymatic Nucleic Acid
agagacagagaaggucagaccagagaaacacacguugugguacauuaccuggua

SEQ ID NO: 13447 - RNA, 54 nt, Artificial Sequence
  Description of Artificial Sequence:  Enzymatic Nucleic Acid
auaagagaagaagagcagaccagagaaacacacguugugguacauuaccuggua

SEQ ID NO: 13448 - RNA, 54 nt, Artificial Sequence
  Description of Artificial Sequence:  Enzymatic Nucleic Acid
cuccacagagaagacgcaaccagagaaacacacguugugguacauuaccuggua

SEQ ID NO: 13449 - RNA, 54 nt, Artificial Sequence
  Description of Artificial Sequence:  Enzymatic Nucleic Acid
cccgaaacagaagaggccaccagagaaacacacguugugguacauuaccuggua

SEQ ID NO: 13450 - RNA, 54 nt, Artificial Sequence
  Description of Artificial Sequence:  Enzymatic Nucleic Acid
gggcccgaagaagcggagaccagagaaacacacguugugguacauuaccuggua

SEQ ID NO: 13451 - RNA, 54 nt, Artificial Sequence
  Description of Artificial Sequence:  Enzymatic Nucleic Acid
aaacagacagaagaagacaccagagaaacacacguugugguacauuaccuggua

SEQ ID NO: 13452 - RNA, 54 nt, Artificial Sequence
  Description of Artificial Sequence:  Enzymatic Nucleic Acid
ggaugguaagaagacaacaccagagaaacacacguugugguacauuaccuggua

SEQ ID NO: 13453 - RNA, 54 nt, Artificial Sequence
  Description of Artificial Sequence:  Enzymatic Nucleic Acid
acuagaggagaagaugauaccagagaaacacacguugugguacauuaccuggua

SEQ ID NO: 13454 - RNA, 54 nt, Artificial Sequence
  Description of Artificial Sequence:  Enzymatic Nucleic Acid
augcgaagagaaggccugaccagagaaacacacguugugguacauuaccuggua

SEQ ID NO: 13455 - RNA, 54 nt, Artificial Sequence
  Description of Artificial Sequence:  Enzymatic Nucleic Acid
uccccgugagaaguaugcaccagagaaacacacguugugguacauuaccuggua

SEQ ID NO: 13456 - RNA, 54 nt, Artificial Sequence
  Description of Artificial Sequence:  Enzymatic Nucleic Acid
cuaggccaagaaggaccaaccagagaaacacacguugugguacauuaccuggua

SEQ ID NO: 13457 - RNA, 54 nt, Artificial Sequence
  Description of Artificial Sequence:  Enzymatic Nucleic Acid
uugagcccagaaguaggcaccagagaaacacacguugugguacauuaccuggua

SEQ ID NO: 13458 - RNA, 54 nt, Artificial Sequence
  Description of Artificial Sequence:  Enzymatic Nucleic Acid
auauauaaagaaggauaaaccagagaaacacacguugugguacauuaccuggua

SEQ ID NO: 13459 - RNA, 54 nt, Artificial Sequence
  Description of Artificial Sequence:  Enzymatic Nucleic Acid
uccucucaagaagccuugaccagagaaacacacguugugguacauuaccuggua

SEQ ID NO: 13460 - RNA, 54 nt, Artificial Sequence
  Description of Artificial Sequence:  Enzymatic Nucleic Acid
uaaauaugagaagauacuaccagagaaacacacguugugguacauuaccuggua

SEQ ID NO: 13461 - RNA, 54 nt, Artificial Sequence
  Description of Artificial Sequence:  Enzymatic Nucleic Acid
agguaugaagaagaugaaaccagagaaacacacguugugguacauuaccuggua

SEQ ID NO: 13462 - RNA, 54 nt, Artificial Sequence
  Description of Artificial Sequence:  Enzymatic Nucleic Acid
ccccaaagagaaggcaccaccagagaaacacacguugugguacauuaccuggua

SEQ ID NO: 13463 - RNA, 54 nt, Artificial Sequence
  Description of Artificial Sequence:  Enzymatic Nucleic Acid
ccggcuccagaaggugugaccagagaaacacacguugugguacauuaccuggua

SEQ ID NO: 13464 - RNA, 54 nt, Artificial Sequence
  Description of Artificial Sequence:  Enzymatic Nucleic Acid
gucugcccagaagugaccaccagagaaacacacguugugguacauuaccuggua

SEQ ID NO: 13465 - RNA, 54 nt, Artificial Sequence
  Description of Artificial Sequence:  Enzymatic Nucleic Acid
uauucaucagaagcccagaccagagaaacacacguugugguacauuaccuggua

SEQ ID NO: 13466 - RNA, 54 nt, Artificial Sequence
  Description of Artificial Sequence:  Enzymatic Nucleic Acid
ucucccaaagaagcuauuaccagagaaacacacguugugguacauuaccuggua

SEQ ID NO: 13467 - RNA, 54 nt, Artificial Sequence
  Description of Artificial Sequence:  Enzymatic Nucleic Acid
cuggcccgagaagagaauaccagagaaacacacguugugguacauuaccuggua

SEQ ID NO: 13468 - RNA, 54 nt, Artificial Sequence
  Description of Artificial Sequence:  Enzymatic Nucleic Acid
cacaggggagaagguaccaccagagaaacacacguugugguacauuaccuggua

SEQ ID NO: 13469 - RNA, 54 nt, Artificial Sequence
  Description of Artificial Sequence:  Enzymatic Nucleic Acid
ucucaucaagaagaaaacaccagagaaacacacguugugguacauuaccuggua

SEQ ID NO: 13470 - RNA, 54 nt, Artificial Sequence
  Description of Artificial Sequence:  Enzymatic Nucleic Acid
ccagucucagaagacagaaccagagaaacacacguugugguacauuaccuggua

SEQ ID NO: 13471 - RNA, 54 nt, Artificial Sequence
  Description of Artificial Sequence:  Enzymatic Nucleic Acid
gggcugcaagaagucucaaccagagaaacacacguugugguacauuaccuggua

SEQ ID NO: 13472 - RNA, 54 nt, Artificial Sequence
  Description of Artificial Sequence:  Enzymatic Nucleic Acid
ccacagugagaagcaggcaccagagaaacacacguugugguacauuaccuggua

SEQ ID NO: 13473 - RNA, 54 nt, Artificial Sequence
  Description of Artificial Sequence:  Enzymatic Nucleic Acid
cacacugcagaagacaagaccagagaaacacacguugugguacauuaccuggua

SEQ ID NO: 13474 - RNA, 54 nt, Artificial Sequence
  Description of Artificial Sequence:  Enzymatic Nucleic Acid
cuguucucagaaguuucuaccagagaaacacacguugugguacauuaccuggua

SEQ ID NO: 13475 - RNA, 54 nt, Artificial Sequence
  Description of Artificial Sequence:  Enzymatic Nucleic Acid
aaaccucaagaagcuguuaccagagaaacacacguugugguacauuaccuggua

SEQ ID NO: 13476 - RNA, 54 nt, Artificial Sequence
  Description of Artificial Sequence:  Enzymatic Nucleic Acid
uuauuaaaagaagaauaaaccagagaaacacacguugugguacauuaccuggua

SEQ ID NO: 13477 - RNA, 54 nt, Artificial Sequence
  Description of Artificial Sequence:  Enzymatic Nucleic Acid
agucuuuaagaagaaccaaccagagaaacacacguugugguacauuaccuggua

SEQ ID NO: 13478 - DNA, 35 bp, Artificial Sequence
  Description of Artificial Sequence:  Enzymatic Nucleic Acid
  misc_feature (1)..(33): Ribonucleotide unmodified or chemically modified as described for this sequence
  misc_feature (1)..(4): Phosphorothioate 3'-Internucleotide Linkage
  misc_feature (1)..(8): 2'-O-Methyl
  misc_feature (14)..(24): 2'-O-Methyl
  misc_feature (26)..(27): 2'-O-Methyl
  misc_feature (29)..(34): 2'-O-Methyl
  misc_feature (9)..(9): 2'-deoxy-2'-amino
  misc_feature (12)..(12): 2'-deoxy-2'-amino
  misc_feature (35)..(35): 3'-attached inverted deoxyabasic derivative
aucuuuucugaugaggcgaaagccgaaaccauatt

SEQ ID NO: 13479 - RNA, 34 nt, Artificial Sequence
  Description of Artificial Sequence:  Enzymatic Nucleic Acid
  misc_feature (1)..(4): Phosphorothioate 3'-Internucleotide Linkage
  misc_feature (1)..(8): 2'-O-Methyl
  misc_feature (10)..(10): 2'-O-Methyl
  misc_feature (14)..(24): 2'-O-Methyl
  misc_feature (26)..(27): 2'-O-Methyl
  misc_feature (29)..(34): 2'-O-Methyl
  misc_feature (9)..(9): 2'-deoxy-2'-amino
  misc_feature (12)..(12): 2'-deoxy-2'-amino
  misc_feature (34)..(34): 3'-attached inverted deoxyabasic derivative
aucuuuucuuaugaggcgaaagccgauaccauac

SEQ ID NO: 13480 - RNA, 34 nt, Artificial Sequence
  Description of Artificial Sequence:  Enzymatic Nucleic Acid
  misc_feature (1)..(4): Phosphorothioate 3'-Internucleotide Linkage
  misc_feature (1)..(8): 2'-O-Methyl
  misc_feature (12)..(12): 2'-O-Methyl
  misc_feature (14)..(24): 2'-O-Methyl
  misc_feature (26)..(27): 2'-O-Methyl
  misc_feature (29)..(34): 2'-O-Methyl
  misc_feature (9)..(9): 2'-deoxy-2'- C-Allyl
  misc_feature (34)..(34): 3'-attached inverted deoxyabasic derivative
aucuuuucugaugaggcgaaagccgaaaccauac

SEQ ID NO: 13481 - RNA, 34 nt, Artificial Sequence; identical to SEQ ID NO: 13479
  Description of Artificial Sequence:  Enzymatic Nucleic Acid
  misc_feature (1)..(4): Phosphorothioate 3'-Internucleotide Linkage
  misc_feature (1)..(8): 2'-O-Methyl
  misc_feature (10)..(10): 2'-O-Methyl
  misc_feature (12)..(12): 2'-O-Methyl
  misc_feature (14)..(24): 2'-O-Methyl
  misc_feature (26)..(27): 2'-O-Methyl
  misc_feature (29)..(34): 2'-O-Methyl
  misc_feature (9)..(9): 2'-deoxy-2'- C-Allyl
  misc_feature (34)..(34): 3'-attached inverted deoxyabasic derivative

SEQ ID NO: 13482 - RNA, 32 nt, Artificial Sequence
  Description of Artificial Sequence:  Enzymatic Nucleic Acid
  misc_feature (1)..(4): Phosphorothioate 3'-Internucleotide Linkage
  misc_feature (1)..(7): 2'-O-Methyl
  misc_feature (13)..(23): 2'-O-Methyl
  misc_feature (25)..(26): 2'-O-Methyl
  misc_feature (28)..(32): 2'-O-Methyl
  misc_feature (8)..(8): 2'-deoxy-2'-amino
  misc_feature (11)..(11): 2'-deoxy-2'-amino
  misc_feature (32)..(32): 3'-attached inverted deoxyabasic derivative
gaguugcugaugaggcgaaagccgaaagucug

SEQ ID NO: 13483 - RNA, 32 nt, Artificial Sequence
  Description of Artificial Sequence:  Enzymatic Nucleic Acid
  misc_feature (1)..(4): Phosphorothioate 3'-Internucleotide Linkage
  misc_feature (1)..(7): 2'-O-Methyl
  misc_feature (9)..(9): 2'-O-Methyl
  misc_feature (13)..(23): 2'-O-Methyl
  misc_feature (25)..(26): 2'-O-Methyl
  misc_feature (28)..(32): 2'-O-Methyl
  misc_feature (8)..(8): 2'-deoxy-2'-amino
  misc_feature (11)..(11): 2'-deoxy-2'-amino
  misc_feature (32)..(32): 3'-attached inverted deoxyabasic derivative
gaguugcuuaugaggcgaaagccgauagucug

SEQ ID NO: 13484 - RNA, 32 nt, Artificial Sequence; identical to SEQ ID NO: 13482
  Description of Artificial Sequence:  Enzymatic Nucleic Acid
  misc_feature (1)..(4): Phosphorothioate 3'-Internucleotide Linkage
  misc_feature (1)..(7): 2'-O-Methyl
  misc_feature (11)..(11): 2'-O-Methyl
  misc_feature (13)..(23): 2'-O-Methyl
  misc_feature (25)..(26): 2'-O-Methyl
  misc_feature (28)..(32): 2'-O-Methyl
  misc_feature (8)..(8): 2'-deoxy-2'- C-Allyl
  misc_feature (33)..(33): 3'-attached inverted deoxyabasic derivative

SEQ ID NO: 13485 - RNA, 32 nt, Artificial Sequence; identical to SEQ ID NO: 13483
  Description of Artificial Sequence:  Enzymatic Nucleic Acid
  misc_feature (1)..(4): Phosphorothioate 3'-Internucleotide Linkage
  misc_feature (1)..(7): 2'-O-Methyl
  misc_feature (9)..(9): 2'-O-Methyl
  misc_feature (11)..(11): 2'-O-Methyl
  misc_feature (13)..(23): 2'-O-Methyl
  misc_feature (25)..(26): 2'-O-Methyl
  misc_feature (28)..(32): 2'-O-Methyl
  misc_feature (8)..(8): 2'-deoxy-2'- C-Allyl
  misc_feature (32)..(32): 3'-attached inverted deoxyabasic derivative

SEQ ID NO: 13486 - RNA, 34 nt, Artificial Sequence
  Description of Artificial Sequence:  Enzymatic Nucleic Acid
  misc_feature (1)..(4): Phosphorothioate 3'-Internucleotide Linkage
  misc_feature (1)..(8): 2'-O-Methyl
  misc_feature (14)..(24): 2'-O-Methyl
  misc_feature (26)..(27): 2'-O-Methyl
  misc_feature (29)..(34): 2'-O-Methyl
  misc_feature (9)..(9): 2'-deoxy-2'-amino
  misc_feature (12)..(12): 2'-deoxy-2'-amino
  misc_feature (34)..(34): 3'-attached inverted deoxyabasic derivative
uacaauucugaugaggcgaaagccgaaaagacaa

SEQ ID NO: 13487 - RNA, 34 nt, Artificial Sequence
  Description of Artificial Sequence:  Enzymatic Nucleic Acid
  misc_feature (1)..(4): Phosphorothioate 3'-Internucleotide Linkage
  misc_feature (1)..(8): 2'-O-Methyl
  misc_feature (10)..(10): 2'-O-Methyl
  misc_feature (14)..(24): 2'-O-Methyl
  misc_feature (26)..(27): 2'-O-Methyl
  misc_feature (29)..(34): 2'-O-Methyl
  misc_feature (9)..(9): 2'-deoxy-2'-amino
  misc_feature (12)..(12): 2'-deoxy-2'-amino
  misc_feature (35)..(35): 3'-attached inverted deoxyabasic derivative
uacaauucuuaugaggcgaaagccgauaagacaa

SEQ ID NO: 13488 - RNA, 34 nt, Artificial Sequence; identical to SEQ ID NO: 13486
  Description of Artificial Sequence:  Enzymatic Nucleic Acid
  misc_feature (1)..(4): Phosphorothioate 3'-Internucleotide Linkage
  misc_feature (1)..(8): 2'-O-Methyl
  misc_feature (12)..(12): 2'-O-Methyl
  misc_feature (14)..(24): 2'-O-Methyl
  misc_feature (26)..(27): 2'-O-Methyl
  misc_feature (29)..(34): 2'-O-Methyl
  misc_feature (9)..(9): 2'-deoxy-2'- C-Allyl
  misc_feature (35)..(35): 3'-attached inverted deoxyabasic derivative

SEQ ID NO: 13489 - RNA, 34 nt, Artificial Sequence; identical to SEQ ID NO: 13487
  Description of Artificial Sequence:  Enzymatic Nucleic Acid
  misc_feature (1)..(4): Phosphorothioate 3'-Internucleotide Linkage
  misc_feature (1)..(8): 2'-O-Methyl
  misc_feature (10)..(10): 2'-O-Methyl
  misc_feature (12)..(12): 2'-O-Methyl
  misc_feature (14)..(24): 2'-O-Methyl
  misc_feature (26)..(27): 2'-O-Methyl
  misc_feature (29)..(34): 2'-O-Methyl
  misc_feature (9)..(9): 2'-deoxy-2'- C-Allyl
  misc_feature (34)..(34): 3'-attached inverted deoxyabasic derivative

SEQ ID NO: 13490 - RNA, 32 nt, Artificial Sequence
  Description of Artificial Sequence:  Enzymatic Nucleic Acid
  misc_feature (1)..(4): Phosphorothioate 3'-Internucleotide Linkage
  misc_feature (1)..(7): 2'-O-Methyl
  misc_feature (13)..(23): 2'-O-Methyl
  misc_feature (25)..(26): 2'-O-Methyl
  misc_feature (28)..(32): 2'-O-Methyl
  misc_feature (8)..(8): 2'-deoxy-2'-amino
  misc_feature (11)..(11): 2'-deoxy-2'-amino
  misc_feature (32)..(32): 3'-attached inverted deoxyabasic derivative
cuggagcugaugaggcgaaagccgaaacacgg

SEQ ID NO: 13491 - RNA, 32 nt, Artificial Sequence
  Description of Artificial Sequence:  Enzymatic Nucleic Acid
  misc_feature (1)..(4): Phosphorothioate 3'-Internucleotide Linkage
  misc_feature (1)..(7): 2'-O-Methyl
  misc_feature (9)..(9): 2'-O-Methyl
  misc_feature (13)..(23): 2'-O-Methyl
  misc_feature (25)..(26): 2'-O-Methyl
  misc_feature (28)..(32): 2'-O-Methyl
  misc_feature (8)..(8): 2'-deoxy-2'-amino
  misc_feature (11)..(11): 2'-deoxy-2'-amino
  misc_feature (32)..(32): 3'-attached inverted deoxyabasic derivative
cuggagcuuaugaggcgaaagccgauacacgg

SEQ ID NO: 13492 - RNA, 32 nt, Artificial Sequence; identical to SEQ ID NO: 13490
  Description of Artificial Sequence:  Enzymatic Nucleic Acid
  misc_feature (1)..(4): Phosphorothioate 3'-Internucleotide Linkage
  misc_feature (1)..(7): 2'-O-Methyl
  misc_feature (11)..(11): 2'-O-Methyl
  misc_feature (13)..(23): 2'-O-Methyl
  misc_feature (25)..(26): 2'-O-Methyl
  misc_feature (28)..(32): 2'-O-Methyl
  misc_feature (8)..(8): 2'-deoxy-2'- C-Allyl
  misc_feature (32)..(32): 3'-attached inverted deoxyabasic derivative

SEQ ID NO: 13493 - RNA, 32 nt, Artificial Sequence; identical to SEQ ID NO: 13491
  Description of Artificial Sequence:  Enzymatic Nucleic Acid
  misc_feature (1)..(4): Phosphorothioate 3'-Internucleotide Linkage
  misc_feature (1)..(7): 2'-O-Methyl
  misc_feature (9)..(9): 2'-O-Methyl
  misc_feature (11)..(11): 2'-O-Methyl
  misc_feature (13)..(23): 2'-O-Methyl
  misc_feature (25)..(26): 2'-O-Methyl
  misc_feature (28)..(32): 2'-O-Methyl
  misc_feature (8)..(8): 2'-deoxy-2'- C-Allyl
  misc_feature (32)..(32): 3'-attached inverted deoxyabasic derivative

SEQ ID NO: 13494 - RNA, 34 nt, Artificial Sequence
  Description of Artificial Sequence:  Enzymatic Nucleic Acid
  misc_feature (1)..(4): Phosphorothioate 3'-Internucleotide Linkage
  misc_feature (1)..(7): 2'-O-Methyl
  misc_feature (11)..(11): 2'-O-Methyl
  misc_feature (13)..(25): 2'-O-Methyl
  misc_feature (27)..(28): 2'-O-Methyl
  misc_feature (30)..(34): 2'-O-Methyl
  misc_feature (8)..(8): 2'-deoxy-2'-amino
  misc_feature (35)..(35): 3'-attached inverted deoxyabasic derivative
gaguugcugaugaggccgaaaggccgaaagucug

SEQ ID NO: 13495 - RNA, 34 nt, Artificial Sequence
  Description of Artificial Sequence:  Enzymatic Nucleic Acid
  misc_feature (1)..(4): Phosphorothioate 3'-Internucleotide Linkage
  misc_feature (1)..(7): 2'-O-Methyl
  misc_feature (11)..(11): 2'-O-Methyl
  misc_feature (13)..(25): 2'-O-Methyl
  misc_feature (27)..(28): 2'-O-Methyl
  misc_feature (30)..(34): 2'-O-Methyl
  misc_feature (8)..(8): 2'-deoxy-2'-amino
  misc_feature (35)..(35): 3'-attached inverted deoxyabasic derivative
gaguugcuagagaggccgaaaggccgauagucug

SEQ ID NO: 13496 - RNA, 33 nt, Artificial Sequence
  Description of Artificial Sequence:  Enzymatic Nucleic Acid
  misc_feature (1)..(4): Phosphorothioate 3'-Internucleotide Linkage
  misc_feature (1)..(7): 2'-O-Methyl
  misc_feature (11)..(11): 2'-O-Methyl
  misc_feature (13)..(25): 2'-O-Methyl
  misc_feature (27)..(28): 2'-O-Methyl
  misc_feature (30)..(33): 2'-O-Methyl
  misc_feature (8)..(8): 2'-deoxy-2'-amino
  misc_feature (33)..(33): 3'-attached inverted deoxyabasic derivative
gaaggucuagugaggccgaaaggccgauauguc

SEQ ID NO: 13497 - RNA, 38 nt, Artificial Sequence
  Description of Artificial Sequence:  Enzymatic Nucleic Acid
  misc_feature (31)..(31): n stands for inosine
ccgagaggcugaugaggccguuaggccgaanuguccgc

SEQ ID NO: 13498 - RNA, 38 nt, Artificial Sequence
  Description of Artificial Sequence:  Enzymatic Nucleic Acid
  misc_feature (31)..(31): n stands for inosine
agccgagacugaugaggccguuaggccgaanagugucc

SEQ ID NO: 13499 - RNA, 38 nt, Artificial Sequence
  Description of Artificial Sequence:  Enzymatic Nucleic Acid
  misc_feature (31)..(31): n stands for inosine
gagccgagcugaugaggccguuaggccgaangaguguc

SEQ ID NO: 13500 - RNA, 38 nt, Artificial Sequence
  Description of Artificial Sequence:  Enzymatic Nucleic Acid
  misc_feature (31)..(31): n stands for inosine
aggagccgcugaugaggccguuaggccgaanaggagug

SEQ ID NO: 13501 - RNA, 38 nt, Artificial Sequence
  Description of Artificial Sequence:  Enzymatic Nucleic Acid
  misc_feature (31)..(31): n stands for inosine
cggggaggcugaugaggccguuaggccgaanccgagag

SEQ ID NO: 13502 - RNA, 38 nt, Artificial Sequence
  Description of Artificial Sequence:  Enzymatic Nucleic Acid
  misc_feature (31)..(31): n stands for inosine
gccggggacugaugaggccguuaggccgaanagccgag

SEQ ID NO: 13503 - RNA, 38 nt, Artificial Sequence
  Description of Artificial Sequence:  Enzymatic Nucleic Acid
  misc_feature (31)..(31): n stands for inosine
ugccggggcugaugaggccguuaggccgaangagccga

SEQ ID NO: 13504 - RNA, 38 nt, Artificial Sequence
  Description of Artificial Sequence:  Enzymatic Nucleic Acid
  misc_feature (31)..(31): n stands for inosine
gcugccggcugaugaggccguuaggccgaanaggagcc

SEQ ID NO: 13505 - RNA, 38 nt, Artificial Sequence
  Description of Artificial Sequence:  Enzymatic Nucleic Acid
  misc_feature (31)..(31): n stands for inosine
cgcugccgcugaugaggccguuaggccgaangaggagc

SEQ ID NO: 13506 - RNA, 38 nt, Artificial Sequence
  Description of Artificial Sequence:  Enzymatic Nucleic Acid
  misc_feature (31)..(31): n stands for inosine
ccgcugcccugaugaggccguuaggccgaanggaggag

SEQ ID NO: 13507 - RNA, 38 nt, Artificial Sequence
  Description of Artificial Sequence:  Enzymatic Nucleic Acid
  misc_feature (31)..(31): n stands for inosine
gccgccgccugaugaggccguuaggccgaanccgggga

SEQ ID NO: 13508 - RNA, 38 nt, Artificial Sequence
  Description of Artificial Sequence:  Enzymatic Nucleic Acid
  misc_feature (31)..(31): n stands for inosine
ccgcuccgcugaugaggccguuaggccgaanccgccgc

SEQ ID NO: 13509 - RNA, 38 nt, Artificial Sequence
  Description of Artificial Sequence:  Enzymatic Nucleic Acid
  misc_feature (31)..(31): n stands for inosine
agccccggcugaugaggccguuaggccgaancccgcuc

SEQ ID NO: 13510 - RNA, 38 nt, Artificial Sequence
  Description of Artificial Sequence:  Enzymatic Nucleic Acid
  misc_feature (31)..(31): n stands for inosine
cgagcccccugaugaggccguuaggccgaanagcccgc

SEQ ID NO: 13511 - RNA, 38 nt, Artificial Sequence
  Description of Artificial Sequence:  Enzymatic Nucleic Acid
  misc_feature (31)..(31): n stands for inosine
ugcacccgcugaugaggccguuaggccgaanccccgga

SEQ ID NO: 13512 - RNA, 38 nt, Artificial Sequence
  Description of Artificial Sequence:  Enzymatic Nucleic Acid
  misc_feature (31)..(31): n stands for inosine
cuggccgccugaugaggccguuaggccgaancacccga

SEQ ID NO: 13513 - RNA, 38 nt, Artificial Sequence
  Description of Artificial Sequence:  Enzymatic Nucleic Acid
  misc_feature (31)..(31): n stands for inosine
ggcccgcucugaugaggccguuaggccgaanccgcugc

SEQ ID NO: 13514 - RNA, 38 nt, Artificial Sequence
  Description of Artificial Sequence:  Enzymatic Nucleic Acid
  misc_feature (31)..(31): n stands for inosine
aggcccgccugaugaggccguuaggccgaangccgcug

SEQ ID NO: 13515 - RNA, 38 nt, Artificial Sequence
  Description of Artificial Sequence:  Enzymatic Nucleic Acid
  misc_feature (31)..(31): n stands for inosine
cgccgccacugaugaggccguuaggccgaancccgcug

SEQ ID NO: 13516 - RNA, 38 nt, Artificial Sequence
  Description of Artificial Sequence:  Enzymatic Nucleic Acid
  misc_feature (31)..(31): n stands for inosine
ucgccgcccugaugaggccguuaggccgaangcccgcu

SEQ ID NO: 13517 - RNA, 38 nt, Artificial Sequence
  Description of Artificial Sequence:  Enzymatic Nucleic Acid
  misc_feature (31)..(31): n stands for inosine
cuuccccgcugaugaggccguuaggccgaanuaauccu

SEQ ID NO: 13518 - RNA, 38 nt, Artificial Sequence
  Description of Artificial Sequence:  Enzymatic Nucleic Acid
  misc_feature (31)..(31): n stands for inosine
acuucccccugaugaggccguuaggccgaanguaaucc

SEQ ID NO: 13519 - RNA, 38 nt, Artificial Sequence
  Description of Artificial Sequence:  Enzymatic Nucleic Acid
  misc_feature (31)..(31): n stands for inosine
cagccaggcugaugaggccguuaggccgaanacaacca

SEQ ID NO: 13520 - RNA, 38 nt, Artificial Sequence
  Description of Artificial Sequence:  Enzymatic Nucleic Acid
  misc_feature (31)..(31): n stands for inosine
uccagccacugaugaggccguuaggccgaanagacaac

SEQ ID NO: 13521 - RNA, 38 nt, Artificial Sequence
  Description of Artificial Sequence:  Enzymatic Nucleic Acid
  misc_feature (31)..(31): n stands for inosine
cuccagcccugaugaggccguuaggccgaangagacaa

SEQ ID NO: 13522 - RNA, 38 nt, Artificial Sequence
  Description of Artificial Sequence:  Enzymatic Nucleic Acid
  misc_feature (31)..(31): n stands for inosine
gcggcucccugaugaggccguuaggccgaanccaggag

SEQ ID NO: 13523 - RNA, 38 nt, Artificial Sequence
  Description of Artificial Sequence:  Enzymatic Nucleic Acid
  misc_feature (31)..(31): n stands for inosine
cgucucgccugaugaggccguuaggccgaancuccagc

SEQ ID NO: 13524 - RNA, 38 nt, Artificial Sequence
  Description of Artificial Sequence:  Enzymatic Nucleic Acid
  misc_feature (31)..(31): n stands for inosine
gcgcccugcugaugaggccguuaggccgaancgcccgu

SEQ ID NO: 13525 - RNA, 38 nt, Artificial Sequence
  Description of Artificial Sequence:  Enzymatic Nucleic Acid
  misc_feature (31)..(31): n stands for inosine
ccgcgccccugaugaggccguuaggccgaanagcgccc

SEQ ID NO: 13526 - RNA, 38 nt, Artificial Sequence
  Description of Artificial Sequence:  Enzymatic Nucleic Acid
  misc_feature (31)..(31): n stands for inosine
ccgccgcccugaugaggccguuaggccgaanccccgcg

SEQ ID NO: 13527 - RNA, 38 nt, Artificial Sequence
  Description of Artificial Sequence:  Enzymatic Nucleic Acid
  misc_feature (31)..(31): n stands for inosine
gccgccagcugaugaggccguuaggccgaanuccgucc

SEQ ID NO: 13528 - RNA, 38 nt, Artificial Sequence
  Description of Artificial Sequence:  Enzymatic Nucleic Acid
  misc_feature (31)..(31): n stands for inosine
cggccgcccugaugaggccguuaggccgaanaguccgu

SEQ ID NO: 13529 - RNA, 38 nt, Artificial Sequence
  Description of Artificial Sequence:  Enzymatic Nucleic Acid
  misc_feature (31)..(31): n stands for inosine
aacgaccccugaugaggccguuaggccgaanccgccag

SEQ ID NO: 13530 - RNA, 38 nt, Artificial Sequence
  Description of Artificial Sequence:  Enzymatic Nucleic Acid
  misc_feature (31)..(31): n stands for inosine
gcuccccccugaugaggccguuaggccgaanccaacga

SEQ ID NO: 13531 - RNA, 38 nt, Artificial Sequence
  Description of Artificial Sequence:  Enzymatic Nucleic Acid
  misc_feature (31)..(31): n stands for inosine
ucgcccggcugaugaggccguuaggccgaancccgcgc

SEQ ID NO: 13532 - RNA, 38 nt, Artificial Sequence
  Description of Artificial Sequence:  Enzymatic Nucleic Acid
  misc_feature (31)..(31): n stands for inosine
gcucgccccugaugaggccguuaggccgaanugcccgc

SEQ ID NO: 13533 - RNA, 38 nt, Artificial Sequence
  Description of Artificial Sequence:  Enzymatic Nucleic Acid
  misc_feature (31)..(31): n stands for inosine
acgcggcccugaugaggccguuaggccgaancucgccc

SEQ ID NO: 13534 - RNA, 38 nt, Artificial Sequence
  Description of Artificial Sequence:  Enzymatic Nucleic Acid
  misc_feature (31)..(31): n stands for inosine
cgcgacgccugaugaggccguuaggccgaanccugcuc

SEQ ID NO: 13535 - RNA, 38 nt, Artificial Sequence
  Description of Artificial Sequence:  Enzymatic Nucleic Acid
  misc_feature (31)..(31): n stands for inosine
ccauggugcugaugaggccguuaggccgaancgcgacg

SEQ ID NO: 13536 - RNA, 38 nt, Artificial Sequence
  Description of Artificial Sequence:  Enzymatic Nucleic Acid
  misc_feature (31)..(31): n stands for inosine
gaccauggcugaugaggccguuaggccgaanagcgcga

SEQ ID NO: 13537 - RNA, 38 nt, Artificial Sequence
  Description of Artificial Sequence:  Enzymatic Nucleic Acid
  misc_feature (31)..(31): n stands for inosine
cugaccaucugaugaggccguuaggccgaanugagcgc

SEQ ID NO: 13538 - RNA, 38 nt, Artificial Sequence
  Description of Artificial Sequence:  Enzymatic Nucleic Acid
  misc_feature (31)..(31): n stands for inosine
gcugaccacugaugaggccguuaggccgaangugagcg

SEQ ID NO: 13539 - RNA, 38 nt, Artificial Sequence
  Description of Artificial Sequence:  Enzymatic Nucleic Acid
  misc_feature (31)..(31): n stands for inosine
ccaguagccugaugaggccguuaggccgaanaccaugg

SEQ ID NO: 13540 - RNA, 38 nt, Artificial Sequence
  Description of Artificial Sequence:  Enzymatic Nucleic Acid
  misc_feature (31)..(31): n stands for inosine
gucccagucugaugaggccguuaggccgaancugacca

SEQ ID NO: 13541 - RNA, 38 nt, Artificial Sequence
  Description of Artificial Sequence:  Enzymatic Nucleic Acid
  misc_feature (31)..(31): n stands for inosine
gguguccccugaugaggccguuaggccgaanuagcuga

SEQ ID NO: 13542 - RNA, 38 nt, Artificial Sequence
  Description of Artificial Sequence:  Enzymatic Nucleic Acid
  misc_feature (31)..(31): n stands for inosine
gaccccggcugaugaggccguuaggccgaanucccagu

SEQ ID NO: 13543 - RNA, 38 nt, Artificial Sequence
  Description of Artificial Sequence:  Enzymatic Nucleic Acid
  misc_feature (31)..(31): n stands for inosine
aggacccccugaugaggccguuaggccgaanuguccca

SEQ ID NO: 13544 - RNA, 38 nt, Artificial Sequence
  Description of Artificial Sequence:  Enzymatic Nucleic Acid
  misc_feature (31)..(31): n stands for inosine
gcacagcacugaugaggccguuaggccgaanaccccgg

SEQ ID NO: 13545 - RNA, 38 nt, Artificial Sequence
  Description of Artificial Sequence:  Enzymatic Nucleic Acid
  misc_feature (31)..(31): n stands for inosine
cgcacagccugaugaggccguuaggccgaangaccccg

SEQ ID NO: 13546 - RNA, 38 nt, Artificial Sequence
  Description of Artificial Sequence:  Enzymatic Nucleic Acid
  misc_feature (31)..(31): n stands for inosine
gcgcgcaccugaugaggccguuaggccgaancaggacc

SEQ ID NO: 13547 - RNA, 38 nt, Artificial Sequence
  Description of Artificial Sequence:  Enzymatic Nucleic Acid
  misc_feature (31)..(31): n stands for inosine
agcugagccugaugaggccguuaggccgaancgcgcac

SEQ ID NO: 13548 - RNA, 38 nt, Artificial Sequence
  Description of Artificial Sequence:  Enzymatic Nucleic Acid
  misc_feature (31)..(31): n stands for inosine
gacagcugcugaugaggccguuaggccgaancagcgcg

SEQ ID NO: 13549 - RNA, 38 nt, Artificial Sequence
  Description of Artificial Sequence:  Enzymatic Nucleic Acid
  misc_feature (31)..(31): n stands for inosine
cagacagccugaugaggccguuaggccgaanagcagcg

SEQ ID NO: 13550 - RNA, 38 nt, Artificial Sequence
  Description of Artificial Sequence:  Enzymatic Nucleic Acid
  misc_feature (31)..(31): n stands for inosine
aagcagaccugaugaggccguuaggccgaancugagca

SEQ ID NO: 13551 - RNA, 38 nt, Artificial Sequence
  Description of Artificial Sequence:  Enzymatic Nucleic Acid
  misc_feature (31)..(31): n stands for inosine
ugagaagccugaugaggccguuaggccgaanacagcug

SEQ ID NO: 13552 - RNA, 38 nt, Artificial Sequence
  Description of Artificial Sequence:  Enzymatic Nucleic Acid
  misc_feature (31)..(31): n stands for inosine
cugugagacugaugaggccguuaggccgaancagacag

SEQ ID NO: 13553 - RNA, 38 nt, Artificial Sequence
  Description of Artificial Sequence:  Enzymatic Nucleic Acid
  misc_feature (31)..(31): n stands for inosine
auccugugcugaugaggccguuaggccgaanaagcaga

SEQ ID NO: 13554 - RNA, 38 nt, Artificial Sequence
  Description of Artificial Sequence:  Enzymatic Nucleic Acid
  misc_feature (31)..(31): n stands for inosine
agauccugcugaugaggccguuaggccgaanagaagca

SEQ ID NO: 13555 - RNA, 38 nt, Artificial Sequence
  Description of Artificial Sequence:  Enzymatic Nucleic Acid
  misc_feature (31)..(31): n stands for inosine
cuagaucccugaugaggccguuaggccgaanugagaag

SEQ ID NO: 13556 - RNA, 38 nt, Artificial Sequence
  Description of Artificial Sequence:  Enzymatic Nucleic Acid
  misc_feature (31)..(31): n stands for inosine
ccugaacucugaugaggccguuaggccgaanauccugu

SEQ ID NO: 13557 - RNA, 38 nt, Artificial Sequence
  Description of Artificial Sequence:  Enzymatic Nucleic Acid
  misc_feature (31)..(31): n stands for inosine
uuugaacccugaugaggccguuaggccgaanaacuaga

SEQ ID NO: 13558 - RNA, 38 nt, Artificial Sequence
  Description of Artificial Sequence:  Enzymatic Nucleic Acid
  misc_feature (31)..(31): n stands for inosine
uuuaauuucugaugaggccguuaggccgaanaaccuga

SEQ ID NO: 13559 - RNA, 38 nt, Artificial Sequence
  Description of Artificial Sequence:  Enzymatic Nucleic Acid
  misc_feature (31)..(31): n stands for inosine
ucaguucacugaugaggccguuaggccgaanaucuuuu

SEQ ID NO: 13560 - RNA, 38 nt, Artificial Sequence
  Description of Artificial Sequence:  Enzymatic Nucleic Acid
  misc_feature (31)..(31): n stands for inosine
cucaguuccugaugaggccguuaggccgaangaucuuu

SEQ ID NO: 13561 - RNA, 38 nt, Artificial Sequence
  Description of Artificial Sequence:  Enzymatic Nucleic Acid
  misc_feature (31)..(31): n stands for inosine
uuaaacuccugaugaggccguuaggccgaanuucagga

SEQ ID NO: 13562 - RNA, 38 nt, Artificial Sequence
  Description of Artificial Sequence:  Enzymatic Nucleic Acid
  misc_feature (31)..(31): n stands for inosine
gugcugggcugaugaggccguuaggccgaanccuuuua

SEQ ID NO: 13563 - RNA, 38 nt, Artificial Sequence
  Description of Artificial Sequence:  Enzymatic Nucleic Acid
  misc_feature (31)..(31): n stands for inosine
augugcugcugaugaggccguuaggccgaanugccuuu

SEQ ID NO: 13564 - RNA, 38 nt, Artificial Sequence
  Description of Artificial Sequence:  Enzymatic Nucleic Acid
  misc_feature (31)..(31): n stands for inosine
gaugugcucugaugaggccguuaggccgaangugccuu

SEQ ID NO: 13565 - RNA, 38 nt, Artificial Sequence
  Description of Artificial Sequence:  Enzymatic Nucleic Acid
  misc_feature (31)..(31): n stands for inosine
ugaugugccugaugaggccguuaggccgaanggugccu

SEQ ID NO: 13566 - RNA, 38 nt, Artificial Sequence
  Description of Artificial Sequence:  Enzymatic Nucleic Acid
  misc_feature (31)..(31): n stands for inosine
gcaugaugcugaugaggccguuaggccgaancugggug

SEQ ID NO: 13567 - RNA, 38 nt, Artificial Sequence
  Description of Artificial Sequence:  Enzymatic Nucleic Acid
  misc_feature (31)..(31): n stands for inosine
uugcaugacugaugaggccguuaggccgaanugcuggg

SEQ ID NO: 13568 - RNA, 38 nt, Artificial Sequence
  Description of Artificial Sequence:  Enzymatic Nucleic Acid
  misc_feature (31)..(31): n stands for inosine
ugcuugcacugaugaggccguuaggccgaanaugugcu

SEQ ID NO: 13569 - RNA, 38 nt, Artificial Sequence
  Description of Artificial Sequence:  Enzymatic Nucleic Acid
  misc_feature (31)..(31): n stands for inosine
ggccugcucugaugaggccguuaggccgaancaugaug

SEQ ID NO: 13570 - RNA, 38 nt, Artificial Sequence
  Description of Artificial Sequence:  Enzymatic Nucleic Acid
  misc_feature (31)..(31): n stands for inosine
gucuggcccugaugaggccguuaggccgaancuugcau

SEQ ID NO: 13571 - RNA, 38 nt, Artificial Sequence
  Description of Artificial Sequence:  Enzymatic Nucleic Acid
  misc_feature (31)..(31): n stands for inosine
cagugucucugaugaggccguuaggccgaanccugcuu

SEQ ID NO: 13572 - RNA, 38 nt, Artificial Sequence
  Description of Artificial Sequence:  Enzymatic Nucleic Acid
  misc_feature (31)..(31): n stands for inosine
gcaguguccugaugaggccguuaggccgaangccugcu

SEQ ID NO: 13573 - RNA, 38 nt, Artificial Sequence
  Description of Artificial Sequence:  Enzymatic Nucleic Acid
  misc_feature (31)..(31): n stands for inosine
agaugcagcugaugaggccguuaggccgaanucuggcc

SEQ ID NO: 13574 - RNA, 38 nt, Artificial Sequence
  Description of Artificial Sequence:  Enzymatic Nucleic Acid
  misc_feature (31)..(31): n stands for inosine
ggagaugccugaugaggccguuaggccgaanugucugg

SEQ ID NO: 13575 - RNA, 38 nt, Artificial Sequence
  Description of Artificial Sequence:  Enzymatic Nucleic Acid
  misc_feature (31)..(31): n stands for inosine
auuggagacugaugaggccguuaggccgaancaguguc

SEQ ID NO: 13576 - RNA, 38 nt, Artificial Sequence
  Description of Artificial Sequence:  Enzymatic Nucleic Acid
  misc_feature (31)..(31): n stands for inosine
ugcauuggcugaugaggccguuaggccgaanaugcagu

SEQ ID NO: 13577 - RNA, 38 nt, Artificial Sequence
  Description of Artificial Sequence:  Enzymatic Nucleic Acid
  misc_feature (31)..(31): n stands for inosine
ccugcauucugaugaggccguuaggccgaanagaugca

SEQ ID NO: 13578 - RNA, 38 nt, Artificial Sequence
  Description of Artificial Sequence:  Enzymatic Nucleic Acid
  misc_feature (31)..(31): n stands for inosine
cccugcaucugaugaggccguuaggccgaangagaugc

SEQ ID NO: 13579 - RNA, 38 nt, Artificial Sequence
  Description of Artificial Sequence:  Enzymatic Nucleic Acid
  misc_feature (31)..(31): n stands for inosine
uucccccccugaugaggccguuaggccgaancauugga

SEQ ID NO: 13580 - RNA, 38 nt, Artificial Sequence
  Description of Artificial Sequence:  Enzymatic Nucleic Acid
  misc_feature (31)..(31): n stands for inosine
uuaugggccugaugaggccguuaggccgaancuucccc

SEQ ID NO: 13581 - RNA, 38 nt, Artificial Sequence
  Description of Artificial Sequence:  Enzymatic Nucleic Acid
  misc_feature (31)..(31): n stands for inosine
cauuuaugcugaugaggccguuaggccgaancugcuuc

SEQ ID NO: 13582 - RNA, 38 nt, Artificial Sequence
  Description of Artificial Sequence:  Enzymatic Nucleic Acid
  misc_feature (31)..(31): n stands for inosine
ccauuuaucugaugaggccguuaggccgaangcugcuu

SEQ ID NO: 13583 - RNA, 38 nt, Artificial Sequence
  Description of Artificial Sequence:  Enzymatic Nucleic Acid
  misc_feature (31)..(31): n stands for inosine
accauuuacugaugaggccguuaggccgaanggcugcu

SEQ ID NO: 13584 - RNA, 38 nt, Artificial Sequence
  Description of Artificial Sequence:  Enzymatic Nucleic Acid
  misc_feature (31)..(31): n stands for inosine
ucaggcaacugaugaggccguuaggccgaanaccauuu

SEQ ID NO: 13585 - RNA, 38 nt, Artificial Sequence
  Description of Artificial Sequence:  Enzymatic Nucleic Acid
  misc_feature (31)..(31): n stands for inosine
ccauuucacugaugaggccguuaggccgaancaaagac

SEQ ID NO: 13586 - RNA, 38 nt, Artificial Sequence
  Description of Artificial Sequence:  Enzymatic Nucleic Acid
  misc_feature (31)..(31): n stands for inosine
accauuuccugaugaggccguuaggccgaangcaaaga

SEQ ID NO: 13587 - RNA, 38 nt, Artificial Sequence
  Description of Artificial Sequence:  Enzymatic Nucleic Acid
  misc_feature (31)..(31): n stands for inosine
uuaugcuccugaugaggccguuaggccgaanccuuucg

SEQ ID NO: 13588 - RNA, 38 nt, Artificial Sequence
  Description of Artificial Sequence:  Enzymatic Nucleic Acid
  misc_feature (31)..(31): n stands for inosine
uuuaguuacugaugaggccguuaggccgaancucagcc

SEQ ID NO: 13589 - RNA, 38 nt, Artificial Sequence
  Description of Artificial Sequence:  Enzymatic Nucleic Acid
  misc_feature (31)..(31): n stands for inosine
gcagauuucugaugaggccguuaggccgaanuuaugcu

SEQ ID NO: 13590 - RNA, 38 nt, Artificial Sequence
  Description of Artificial Sequence:  Enzymatic Nucleic Acid
  misc_feature (31)..(31): n stands for inosine
ccacaggccugaugaggccguuaggccgaanauuuagu

SEQ ID NO: 13591 - RNA, 38 nt, Artificial Sequence
  Description of Artificial Sequence:  Enzymatic Nucleic Acid
  misc_feature (31)..(31): n stands for inosine
cuuccacacugaugaggccguuaggccgaancagauuu

SEQ ID NO: 13592 - RNA, 38 nt, Artificial Sequence
  Description of Artificial Sequence:  Enzymatic Nucleic Acid
  misc_feature (31)..(31): n stands for inosine
ucuuccaccugaugaggccguuaggccgaangcagauu

SEQ ID NO: 13593 - RNA, 38 nt, Artificial Sequence
  Description of Artificial Sequence:  Enzymatic Nucleic Acid
  misc_feature (31)..(31): n stands for inosine
gaauuguucugaugaggccguuaggccgaanccauuuc

SEQ ID NO: 13594 - RNA, 38 nt, Artificial Sequence
  Description of Artificial Sequence:  Enzymatic Nucleic Acid
  misc_feature (31)..(31): n stands for inosine
ugcagaaucugaugaggccguuaggccgaanuuugcca

SEQ ID NO: 13595 - RNA, 38 nt, Artificial Sequence
  Description of Artificial Sequence:  Enzymatic Nucleic Acid
  misc_feature (31)..(31): n stands for inosine
aguacugccugaugaggccguuaggccgaanaauuguu

SEQ ID NO: 13596 - RNA, 38 nt, Artificial Sequence
  Description of Artificial Sequence:  Enzymatic Nucleic Acid
  misc_feature (31)..(31): n stands for inosine
uaaaguaccugaugaggccguuaggccgaancagaauu

SEQ ID NO: 13597 - RNA, 38 nt, Artificial Sequence
  Description of Artificial Sequence:  Enzymatic Nucleic Acid
  misc_feature (31)..(31): n stands for inosine
aagguuaacugaugaggccguuaggccgaanuacugca

SEQ ID NO: 13598 - RNA, 38 nt, Artificial Sequence
  Description of Artificial Sequence:  Enzymatic Nucleic Acid
  misc_feature (31)..(31): n stands for inosine
guguucaacugaugaggccguuaggccgaanuuaaagu

SEQ ID NO: 13599 - RNA, 38 nt, Artificial Sequence
  Description of Artificial Sequence:  Enzymatic Nucleic Acid
  misc_feature (31)..(31): n stands for inosine
uguguucacugaugaggccguuaggccgaanguuaaag

SEQ ID NO: 13600 - RNA, 38 nt, Artificial Sequence
  Description of Artificial Sequence:  Enzymatic Nucleic Acid
  misc_feature (31)..(31): n stands for inosine
uugagcugcugaugaggccguuaggccgaanuucaagg

SEQ ID NO: 13601 - RNA, 38 nt, Artificial Sequence
  Description of Artificial Sequence:  Enzymatic Nucleic Acid
  misc_feature (31)..(31): n stands for inosine
gcuugagccugaugaggccguuaggccgaanuguucaa

SEQ ID NO: 13602 - RNA, 38 nt, Artificial Sequence
  Description of Artificial Sequence:  Enzymatic Nucleic Acid
  misc_feature (31)..(31): n stands for inosine
uuugcuugcugaugaggccguuaggccgaancuguguu

SEQ ID NO: 13603 - RNA, 38 nt, Artificial Sequence
  Description of Artificial Sequence:  Enzymatic Nucleic Acid
  misc_feature (31)..(31): n stands for inosine
gguuugcucugaugaggccguuaggccgaanagcugug

SEQ ID NO: 13604 - RNA, 38 nt, Artificial Sequence
  Description of Artificial Sequence:  Enzymatic Nucleic Acid
  misc_feature (31)..(31): n stands for inosine
gugugguucugaugaggccguuaggccgaancuugagc

SEQ ID NO: 13605 - RNA, 38 nt, Artificial Sequence
  Description of Artificial Sequence:  Enzymatic Nucleic Acid
  misc_feature (31)..(31): n stands for inosine
gccagugucugaugaggccguuaggccgaanuuugcuu

SEQ ID NO: 13606 - RNA, 38 nt, Artificial Sequence
  Description of Artificial Sequence:  Enzymatic Nucleic Acid
  misc_feature (31)..(31): n stands for inosine
agccagugcugaugaggccguuaggccgaanguuugcu

SEQ ID NO: 13607 - RNA, 38 nt, Artificial Sequence
  Description of Artificial Sequence:  Enzymatic Nucleic Acid
  misc_feature (31)..(31): n stands for inosine
gaagccagcugaugaggccguuaggccgaanugguuug

SEQ ID NO: 13608 - RNA, 38 nt, Artificial Sequence
  Description of Artificial Sequence:  Enzymatic Nucleic Acid
  misc_feature (31)..(31): n stands for inosine
uagaagcccugaugaggccguuaggccgaanugugguu

SEQ ID NO: 13609 - RNA, 38 nt, Artificial Sequence
  Description of Artificial Sequence:  Enzymatic Nucleic Acid
  misc_feature (31)..(31): n stands for inosine
gcuguagacugaugaggccguuaggccgaanccagugu

SEQ ID NO: 13610 - RNA, 38 nt, Artificial Sequence
  Description of Artificial Sequence:  Enzymatic Nucleic Acid
  misc_feature (31)..(31): n stands for inosine
gcagcugucugaugaggccguuaggccgaanaagccag

SEQ ID NO: 13611 - RNA, 38 nt, Artificial Sequence
  Description of Artificial Sequence:  Enzymatic Nucleic Acid
  misc_feature (31)..(31): n stands for inosine
uuugcagccugaugaggccguuaggccgaanuagaagc

SEQ ID NO: 13612 - RNA, 38 nt, Artificial Sequence
  Description of Artificial Sequence:  Enzymatic Nucleic Acid
  misc_feature (31)..(31): n stands for inosine
auauuugccugaugaggccguuaggccgaancuguaga

SEQ ID NO: 13613 - RNA, 38 nt, Artificial Sequence
  Description of Artificial Sequence:  Enzymatic Nucleic Acid
  misc_feature (31)..(31): n stands for inosine
uagauauucugaugaggccguuaggccgaancagcugu

SEQ ID NO: 13614 - RNA, 38 nt, Artificial Sequence
  Description of Artificial Sequence:  Enzymatic Nucleic Acid
  misc_feature (31)..(31): n stands for inosine
guacagcucugaugaggccguuaggccgaanauauuug

SEQ ID NO: 13615 - RNA, 38 nt, Artificial Sequence
  Description of Artificial Sequence:  Enzymatic Nucleic Acid
  misc_feature (31)..(31): n stands for inosine
guagguaccugaugaggccguuaggccgaancuagaua

SEQ ID NO: 13616 - RNA, 38 nt, Artificial Sequence
  Description of Artificial Sequence:  Enzymatic Nucleic Acid
  misc_feature (31)..(31): n stands for inosine
uugaaguacugaugaggccguuaggccgaanuacagcu

SEQ ID NO: 13617 - RNA, 38 nt, Artificial Sequence
  Description of Artificial Sequence:  Enzymatic Nucleic Acid
  misc_feature (31)..(31): n stands for inosine
uuugaagucugaugaggccguuaggccgaanguacagc

SEQ ID NO: 13618 - RNA, 38 nt, Artificial Sequence
  Description of Artificial Sequence:  Enzymatic Nucleic Acid
  misc_feature (31)..(31): n stands for inosine
uucuuugacugaugaggccguuaggccgaanuagguac

SEQ ID NO: 13619 - RNA, 38 nt, Artificial Sequence
  Description of Artificial Sequence:  Enzymatic Nucleic Acid
  misc_feature (31)..(31): n stands for inosine
uucuucuucugaugaggccguuaggccgaanaaguagg

SEQ ID NO: 13620 - RNA, 38 nt, Artificial Sequence
  Description of Artificial Sequence:  Enzymatic Nucleic Acid
  misc_feature (31)..(31): n stands for inosine
gcagauuccugaugaggccguuaggccgaanuuuccuu

SEQ ID NO: 13621 - RNA, 38 nt, Artificial Sequence
  Description of Artificial Sequence:  Enzymatic Nucleic Acid
  misc_feature (31)..(31): n stands for inosine
uagauugccugaugaggccguuaggccgaanauucugu

SEQ ID NO: 13622 - RNA, 38 nt, Artificial Sequence
  Description of Artificial Sequence:  Enzymatic Nucleic Acid
  misc_feature (31)..(31): n stands for inosine
auauagaucugaugaggccguuaggccgaancagauuc

SEQ ID NO: 13623 - RNA, 38 nt, Artificial Sequence
  Description of Artificial Sequence:  Enzymatic Nucleic Acid
  misc_feature (31)..(31): n stands for inosine
aaauauaucugaugaggccguuaggccgaanauugcag

SEQ ID NO: 13624 - RNA, 38 nt, Artificial Sequence
  Description of Artificial Sequence:  Enzymatic Nucleic Acid
  misc_feature (31)..(31): n stands for inosine
ggucuacccugaugaggccguuaggccgaanuaucacu

SEQ ID NO: 13625 - RNA, 38 nt, Artificial Sequence
  Description of Artificial Sequence:  Enzymatic Nucleic Acid
  misc_feature (31)..(31): n stands for inosine
cuacgaaacugaugaggccguuaggccgaanucuaccu

SEQ ID NO: 13626 - RNA, 38 nt, Artificial Sequence
  Description of Artificial Sequence:  Enzymatic Nucleic Acid
  misc_feature (31)..(31): n stands for inosine
ucuacgaacugaugaggccguuaggccgaangucuacc

SEQ ID NO: 13627 - RNA, 38 nt, Artificial Sequence
  Description of Artificial Sequence:  Enzymatic Nucleic Acid
  misc_feature (31)..(31): n stands for inosine
gauuucaccugaugaggccguuaggccgaanuacaucu

SEQ ID NO: 13628 - RNA, 38 nt, Artificial Sequence
  Description of Artificial Sequence:  Enzymatic Nucleic Acid
  misc_feature (31)..(31): n stands for inosine
aauuucggcugaugaggccguuaggccgaanauuucac

SEQ ID NO: 13629 - RNA, 38 nt, Artificial Sequence
  Description of Artificial Sequence:  Enzymatic Nucleic Acid
  misc_feature (31)..(31): n stands for inosine
uaauuucgcugaugaggccguuaggccgaangauuuca

SEQ ID NO: 13630 - RNA, 38 nt, Artificial Sequence
  Description of Artificial Sequence:  Enzymatic Nucleic Acid
  misc_feature (31)..(31): n stands for inosine
auaauuuccugaugaggccguuaggccgaanggauuuc

SEQ ID NO: 13631 - RNA, 38 nt, Artificial Sequence
  Description of Artificial Sequence:  Enzymatic Nucleic Acid
  misc_feature (31)..(31): n stands for inosine
cagucaugcugaugaggccguuaggccgaanuauaauu

SEQ ID NO: 13632 - RNA, 38 nt, Artificial Sequence
  Description of Artificial Sequence:  Enzymatic Nucleic Acid
  misc_feature (31)..(31): n stands for inosine
uucagucacugaugaggccguuaggccgaanuguauaa

SEQ ID NO: 13633 - RNA, 38 nt, Artificial Sequence
  Description of Artificial Sequence:  Enzymatic Nucleic Acid
  misc_feature (31)..(31): n stands for inosine
cuuccuuccugaugaggccguuaggccgaanucaugug

SEQ ID NO: 13634 - RNA, 38 nt, Artificial Sequence
  Description of Artificial Sequence:  Enzymatic Nucleic Acid
  misc_feature (31)..(31): n stands for inosine
gaaugacgcugaugaggccguuaggccgaancucccuu

SEQ ID NO: 13635 - RNA, 38 nt, Artificial Sequence
  Description of Artificial Sequence:  Enzymatic Nucleic Acid
  misc_feature (31)..(31): n stands for inosine
gcagggaacugaugaggccguuaggccgaanacgagcu

SEQ ID NO: 13636 - RNA, 38 nt, Artificial Sequence
  Description of Artificial Sequence:  Enzymatic Nucleic Acid
  misc_feature (31)..(31): n stands for inosine
cccggcagcugaugaggccguuaggccgaanaaugacg

SEQ ID NO: 13637 - RNA, 38 nt, Artificial Sequence
  Description of Artificial Sequence:  Enzymatic Nucleic Acid
  misc_feature (31)..(31): n stands for inosine
acccggcacugaugaggccguuaggccgaangaaugac

SEQ ID NO: 13638 - RNA, 38 nt, Artificial Sequence
  Description of Artificial Sequence:  Enzymatic Nucleic Acid
  misc_feature (31)..(31): n stands for inosine
aacccggccugaugaggccguuaggccgaanggaauga

SEQ ID NO: 13639 - RNA, 38 nt, Artificial Sequence
  Description of Artificial Sequence:  Enzymatic Nucleic Acid
  misc_feature (31)..(31): n stands for inosine
cguaaccccugaugaggccguuaggccgaancagggaa

SEQ ID NO: 13640 - RNA, 38 nt, Artificial Sequence
  Description of Artificial Sequence:  Enzymatic Nucleic Acid
  misc_feature (31)..(31): n stands for inosine
auguuaggcugaugaggccguuaggccgaanacguaac

SEQ ID NO: 13641 - RNA, 38 nt, Artificial Sequence
  Description of Artificial Sequence:  Enzymatic Nucleic Acid
  misc_feature (31)..(31): n stands for inosine
ugauguuacugaugaggccguuaggccgaanugacgua

SEQ ID NO: 13642 - RNA, 38 nt, Artificial Sequence
  Description of Artificial Sequence:  Enzymatic Nucleic Acid
  misc_feature (31)..(31): n stands for inosine
gugauguucugaugaggccguuaggccgaangugacgu

SEQ ID NO: 13643 - RNA, 38 nt, Artificial Sequence
  Description of Artificial Sequence:  Enzymatic Nucleic Acid
  misc_feature (31)..(31): n stands for inosine
aacagugacugaugaggccguuaggccgaanuuaggug

SEQ ID NO: 13644 - RNA, 38 nt, Artificial Sequence
  Description of Artificial Sequence:  Enzymatic Nucleic Acid
  misc_feature (31)..(31): n stands for inosine
aguaacagcugaugaggccguuaggccgaanauguuag

SEQ ID NO: 13645 - RNA, 38 nt, Artificial Sequence
  Description of Artificial Sequence:  Enzymatic Nucleic Acid
  misc_feature (31)..(31): n stands for inosine
aaaguaaccugaugaggccguuaggccgaanugauguu

SEQ ID NO: 13646 - RNA, 38 nt, Artificial Sequence
  Description of Artificial Sequence:  Enzymatic Nucleic Acid
  misc_feature (31)..(31): n stands for inosine
uuuuuuaacugaugaggccguuaggccgaanuaacagu

SEQ ID NO: 13647 - RNA, 38 nt, Artificial Sequence
  Description of Artificial Sequence:  Enzymatic Nucleic Acid
  misc_feature (31)..(31): n stands for inosine
ugucaagucugaugaggccguuaggccgaanaaacuuu

SEQ ID NO: 13648 - RNA, 38 nt, Artificial Sequence
  Description of Artificial Sequence:  Enzymatic Nucleic Acid
  misc_feature (31)..(31): n stands for inosine
gugucaagcugaugaggccguuaggccgaangaaacuu

SEQ ID NO: 13649 - RNA, 38 nt, Artificial Sequence
  Description of Artificial Sequence:  Enzymatic Nucleic Acid
  misc_feature (31)..(31): n stands for inosine
aagugucacugaugaggccguuaggccgaanuggaaac

SEQ ID NO: 13650 - RNA, 38 nt, Artificial Sequence
  Description of Artificial Sequence:  Enzymatic Nucleic Acid
  misc_feature (31)..(31): n stands for inosine
gaucaaagcugaugaggccguuaggccgaanucaagug

SEQ ID NO: 13651 - RNA, 38 nt, Artificial Sequence
  Description of Artificial Sequence:  Enzymatic Nucleic Acid
  misc_feature (31)..(31): n stands for inosine
gggaucaacugaugaggccguuaggccgaanugucaag

SEQ ID NO: 13652 - RNA, 38 nt, Artificial Sequence
  Description of Artificial Sequence:  Enzymatic Nucleic Acid
  misc_feature (31)..(31): n stands for inosine
uccaucagcugaugaggccguuaggccgaanaucaaag

SEQ ID NO: 13653 - RNA, 38 nt, Artificial Sequence
  Description of Artificial Sequence:  Enzymatic Nucleic Acid
  misc_feature (31)..(31): n stands for inosine
uuccaucacugaugaggccguuaggccgaangaucaaa

SEQ ID NO: 13654 - RNA, 38 nt, Artificial Sequence
  Description of Artificial Sequence:  Enzymatic Nucleic Acid
  misc_feature (31)..(31): n stands for inosine
uuuccauccugaugaggccguuaggccgaanggaucaa

SEQ ID NO: 13655 - RNA, 38 nt, Artificial Sequence
  Description of Artificial Sequence:  Enzymatic Nucleic Acid
  misc_feature (31)..(31): n stands for inosine
ccagauuacugaugaggccguuaggccgaancguuuuc

SEQ ID NO: 13656 - RNA, 38 nt, Artificial Sequence
  Description of Artificial Sequence:  Enzymatic Nucleic Acid
  misc_feature (31)..(31): n stands for inosine
acuguccccugaugaggccguuaggccgaanauuaugc

SEQ ID NO: 13657 - RNA, 38 nt, Artificial Sequence
  Description of Artificial Sequence:  Enzymatic Nucleic Acid
  misc_feature (31)..(31): n stands for inosine
cuuucuaccugaugaggccguuaggccgaanucccaga

SEQ ID NO: 13658 - RNA, 38 nt, Artificial Sequence
  Description of Artificial Sequence:  Enzymatic Nucleic Acid
  misc_feature (31)..(31): n stands for inosine
uaugaugacugaugaggccguuaggccgaancccuuuc

SEQ ID NO: 13659 - RNA, 38 nt, Artificial Sequence
  Description of Artificial Sequence:  Enzymatic Nucleic Acid
  misc_feature (31)..(31): n stands for inosine
ugauaugacugaugaggccguuaggccgaanaagcccu

SEQ ID NO: 13660 - RNA, 38 nt, Artificial Sequence
  Description of Artificial Sequence:  Enzymatic Nucleic Acid
  misc_feature (31)..(31): n stands for inosine
auuugauacugaugaggccguuaggccgaanaugaagc

SEQ ID NO: 13661 - RNA, 38 nt, Artificial Sequence
  Description of Artificial Sequence:  Enzymatic Nucleic Acid
  misc_feature (31)..(31): n stands for inosine
guugcauucugaugaggccguuaggccgaanauaugau

SEQ ID NO: 13662 - RNA, 38 nt, Artificial Sequence
  Description of Artificial Sequence:  Enzymatic Nucleic Acid
  misc_feature (31)..(31): n stands for inosine
uuguacgucugaugaggccguuaggccgaancauuuga

SEQ ID NO: 13663 - RNA, 38 nt, Artificial Sequence
  Description of Artificial Sequence:  Enzymatic Nucleic Acid
  misc_feature (31)..(31): n stands for inosine
uauuucuucugaugaggccguuaggccgaanuacguug

SEQ ID NO: 13664 - RNA, 38 nt, Artificial Sequence
  Description of Artificial Sequence:  Enzymatic Nucleic Acid
  misc_feature (31)..(31): n stands for inosine
aggucagacugaugaggccguuaggccgaancccuauu

SEQ ID NO: 13665 - RNA, 38 nt, Artificial Sequence
  Description of Artificial Sequence:  Enzymatic Nucleic Acid
  misc_feature (31)..(31): n stands for inosine
cacagguccugaugaggccguuaggccgaanaagcccu

SEQ ID NO: 13666 - RNA, 38 nt, Artificial Sequence
  Description of Artificial Sequence:  Enzymatic Nucleic Acid
  misc_feature (31)..(31): n stands for inosine
gcuucacacugaugaggccguuaggccgaanucagaag

SEQ ID NO: 13667 - RNA, 38 nt, Artificial Sequence
  Description of Artificial Sequence:  Enzymatic Nucleic Acid
  misc_feature (31)..(31): n stands for inosine
ugcuucaccugaugaggccguuaggccgaangucagaa

SEQ ID NO: 13668 - RNA, 38 nt, Artificial Sequence
  Description of Artificial Sequence:  Enzymatic Nucleic Acid
  misc_feature (31)..(31): n stands for inosine
uugacugucugaugaggccguuaggccgaancuucaca

SEQ ID NO: 13669 - RNA, 38 nt, Artificial Sequence
  Description of Artificial Sequence:  Enzymatic Nucleic Acid
  misc_feature (31)..(31): n stands for inosine
ccauugaccugaugaggccguuaggccgaanuugcuuc

SEQ ID NO: 13670 - RNA, 38 nt, Artificial Sequence
  Description of Artificial Sequence:  Enzymatic Nucleic Acid
  misc_feature (31)..(31): n stands for inosine
augcccaucugaugaggccguuaggccgaanacuguug

SEQ ID NO: 13671 - RNA, 38 nt, Artificial Sequence
  Description of Artificial Sequence:  Enzymatic Nucleic Acid
  misc_feature (31)..(31): n stands for inosine
uauacaaacugaugaggccguuaggccgaancccauug

SEQ ID NO: 13672 - RNA, 38 nt, Artificial Sequence
  Description of Artificial Sequence:  Enzymatic Nucleic Acid
  misc_feature (31)..(31): n stands for inosine
agauaguucugaugaggccguuaggccgaanucuuaua

SEQ ID NO: 13673 - RNA, 38 nt, Artificial Sequence
  Description of Artificial Sequence:  Enzymatic Nucleic Acid
  misc_feature (31)..(31): n stands for inosine
ugugagaucugaugaggccguuaggccgaanuuugucu

SEQ ID NO: 13674 - RNA, 38 nt, Artificial Sequence
  Description of Artificial Sequence:  Enzymatic Nucleic Acid
  misc_feature (31)..(31): n stands for inosine
gaugugugcugaugaggccguuaggccgaanauaguuu

SEQ ID NO: 13675 - RNA, 38 nt, Artificial Sequence
  Description of Artificial Sequence:  Enzymatic Nucleic Acid
  misc_feature (31)..(31): n stands for inosine
ucgaugugcugaugaggccguuaggccgaanagauagu

SEQ ID NO: 13676 - RNA, 38 nt, Artificial Sequence
  Description of Artificial Sequence:  Enzymatic Nucleic Acid
  misc_feature (31)..(31): n stands for inosine
ugucgaugcugaugaggccguuaggccgaanugagaua

SEQ ID NO: 13677 - RNA, 38 nt, Artificial Sequence
  Description of Artificial Sequence:  Enzymatic Nucleic Acid
  misc_feature (31)..(31): n stands for inosine
uuugucgacugaugaggccguuaggccgaanugugaga

SEQ ID NO: 13678 - RNA, 38 nt, Artificial Sequence
  Description of Artificial Sequence:  Enzymatic Nucleic Acid
  misc_feature (31)..(31): n stands for inosine
uauugguucugaugaggccguuaggccgaanucgaugu

SEQ ID NO: 13679 - RNA, 38 nt, Artificial Sequence
  Description of Artificial Sequence:  Enzymatic Nucleic Acid
  misc_feature (31)..(31): n stands for inosine
auuguauucugaugaggccguuaggccgaanuuugucg

SEQ ID NO: 13680 - RNA, 38 nt, Artificial Sequence
  Description of Artificial Sequence:  Enzymatic Nucleic Acid
  misc_feature (31)..(31): n stands for inosine
gauuguaucugaugaggccguuaggccgaanguuuguc

SEQ ID NO: 13681 - RNA, 38 nt, Artificial Sequence
  Description of Artificial Sequence:  Enzymatic Nucleic Acid
  misc_feature (31)..(31): n stands for inosine
ucuaugaucugaugaggccguuaggccgaanuauuggu

SEQ ID NO: 13682 - RNA, 38 nt, Artificial Sequence
  Description of Artificial Sequence:  Enzymatic Nucleic Acid
  misc_feature (31)..(31): n stands for inosine
gacaucuacugaugaggccguuaggccgaanauuguau

SEQ ID NO: 13683 - RNA, 38 nt, Artificial Sequence
  Description of Artificial Sequence:  Enzymatic Nucleic Acid
  misc_feature (31)..(31): n stands for inosine
gcuuauuucugaugaggccguuaggccgaanacaucua

SEQ ID NO: 13684 - RNA, 38 nt, Artificial Sequence
  Description of Artificial Sequence:  Enzymatic Nucleic Acid
  misc_feature (31)..(31): n stands for inosine
ugcuuauucugaugaggccguuaggccgaangacaucu

SEQ ID NO: 13685 - RNA, 38 nt, Artificial Sequence
  Description of Artificial Sequence:  Enzymatic Nucleic Acid
  misc_feature (31)..(31): n stands for inosine
gcguggugcugaugaggccguuaggccgaancuuauuu

SEQ ID NO: 13686 - RNA, 38 nt, Artificial Sequence
  Description of Artificial Sequence:  Enzymatic Nucleic Acid
  misc_feature (31)..(31): n stands for inosine
gggcguggcugaugaggccguuaggccgaanugcuuau

SEQ ID NO: 13687 - RNA, 38 nt, Artificial Sequence
  Description of Artificial Sequence:  Enzymatic Nucleic Acid
  misc_feature (31)..(31): n stands for inosine
cugggcgucugaugaggccguuaggccgaanugugcuu

SEQ ID NO: 13688 - RNA, 38 nt, Artificial Sequence
  Description of Artificial Sequence:  Enzymatic Nucleic Acid
  misc_feature (31)..(31): n stands for inosine
acugggcgcugaugaggccguuaggccgaangugugcu

SEQ ID NO: 13689 - RNA, 38 nt, Artificial Sequence
  Description of Artificial Sequence:  Enzymatic Nucleic Acid
  misc_feature (31)..(31): n stands for inosine
uuugacugcugaugaggccguuaggccgaancguggug

SEQ ID NO: 13690 - RNA, 38 nt, Artificial Sequence
  Description of Artificial Sequence:  Enzymatic Nucleic Acid
  misc_feature (31)..(31): n stands for inosine
auuugacucugaugaggccguuaggccgaangcguggu

SEQ ID NO: 13691 - RNA, 38 nt, Artificial Sequence
  Description of Artificial Sequence:  Enzymatic Nucleic Acid
  misc_feature (31)..(31): n stands for inosine
aauuugaccugaugaggccguuaggccgaanggcgugg

SEQ ID NO: 13692 - RNA, 38 nt, Artificial Sequence
  Description of Artificial Sequence:  Enzymatic Nucleic Acid
  misc_feature (31)..(31): n stands for inosine
aaguaauucugaugaggccguuaggccgaanacugggc

SEQ ID NO: 13693 - RNA, 38 nt, Artificial Sequence
  Description of Artificial Sequence:  Enzymatic Nucleic Acid
  misc_feature (31)..(31): n stands for inosine
ggccucuacugaugaggccguuaggccgaanuaauuug

SEQ ID NO: 13694 - RNA, 38 nt, Artificial Sequence
  Description of Artificial Sequence:  Enzymatic Nucleic Acid
  misc_feature (31)..(31): n stands for inosine
aagaguaucugaugaggccguuaggccgaanccucuaa

SEQ ID NO: 13695 - RNA, 38 nt, Artificial Sequence
  Description of Artificial Sequence:  Enzymatic Nucleic Acid
  misc_feature (31)..(31): n stands for inosine
caagaguacugaugaggccguuaggccgaangccucua

SEQ ID NO: 13696 - RNA, 38 nt, Artificial Sequence
  Description of Artificial Sequence:  Enzymatic Nucleic Acid
  misc_feature (31)..(31): n stands for inosine
aggacaagcugaugaggccguuaggccgaanuauggcc

SEQ ID NO: 13697 - RNA, 38 nt, Artificial Sequence
  Description of Artificial Sequence:  Enzymatic Nucleic Acid
  misc_feature (31)..(31): n stands for inosine
ugaggacacugaugaggccguuaggccgaanaguaugg

SEQ ID NO: 13698 - RNA, 38 nt, Artificial Sequence
  Description of Artificial Sequence:  Enzymatic Nucleic Acid
  misc_feature (31)..(31): n stands for inosine
acaauugacugaugaggccguuaggccgaanacaagag

SEQ ID NO: 13699 - RNA, 38 nt, Artificial Sequence
  Description of Artificial Sequence:  Enzymatic Nucleic Acid
  misc_feature (31)..(31): n stands for inosine
uacaauugcugaugaggccguuaggccgaangacaaga

SEQ ID NO: 13700 - RNA, 38 nt, Artificial Sequence
  Description of Artificial Sequence:  Enzymatic Nucleic Acid
  misc_feature (31)..(31): n stands for inosine
aguacaaucugaugaggccguuaggccgaanaggacaa

SEQ ID NO: 13701 - RNA, 38 nt, Artificial Sequence
  Description of Artificial Sequence:  Enzymatic Nucleic Acid
  misc_feature (31)..(31): n stands for inosine
gugguagccugaugaggccguuaggccgaanuacaauu

SEQ ID NO: 13702 - RNA, 38 nt, Artificial Sequence
  Description of Artificial Sequence:  Enzymatic Nucleic Acid
  misc_feature (31)..(31): n stands for inosine
ggaguggucugaugaggccguuaggccgaancaguaca

SEQ ID NO: 13703 - RNA, 38 nt, Artificial Sequence
  Description of Artificial Sequence:  Enzymatic Nucleic Acid
  misc_feature (31)..(31): n stands for inosine
aagggagucugaugaggccguuaggccgaanuagcagu

SEQ ID NO: 13704 - RNA, 38 nt, Artificial Sequence
  Description of Artificial Sequence:  Enzymatic Nucleic Acid
  misc_feature (31)..(31): n stands for inosine
caagggagcugaugaggccguuaggccgaanguagcag

SEQ ID NO: 13705 - RNA, 38 nt, Artificial Sequence
  Description of Artificial Sequence:  Enzymatic Nucleic Acid
  misc_feature (31)..(31): n stands for inosine
uucaagggcugaugaggccguuaggccgaanugguagc

SEQ ID NO: 13706 - RNA, 38 nt, Artificial Sequence
  Description of Artificial Sequence:  Enzymatic Nucleic Acid
  misc_feature (31)..(31): n stands for inosine
uguucaagcugaugaggccguuaggccgaanaguggua

SEQ ID NO: 13707 - RNA, 38 nt, Artificial Sequence
  Description of Artificial Sequence:  Enzymatic Nucleic Acid
  misc_feature (31)..(31): n stands for inosine
guguucaacugaugaggccguuaggccgaangaguggu

SEQ ID NO: 13708 - RNA, 38 nt, Artificial Sequence
  Description of Artificial Sequence:  Enzymatic Nucleic Acid
  misc_feature (31)..(31): n stands for inosine
cguguucacugaugaggccguuaggccgaanggagugg

SEQ ID NO: 13709 - RNA, 38 nt, Artificial Sequence
  Description of Artificial Sequence:  Enzymatic Nucleic Acid
  misc_feature (31)..(31): n stands for inosine
aacucucgcugaugaggccguuaggccgaanuucaagg

SEQ ID NO: 13710 - RNA, 38 nt, Artificial Sequence
  Description of Artificial Sequence:  Enzymatic Nucleic Acid
  misc_feature (31)..(31): n stands for inosine
aggucauucugaugaggccguuaggccgaanaacucuc

SEQ ID NO: 13711 - RNA, 38 nt, Artificial Sequence
  Description of Artificial Sequence:  Enzymatic Nucleic Acid
  misc_feature (31)..(31): n stands for inosine
uaacuccacugaugaggccguuaggccgaanucauuug

SEQ ID NO: 13712 - RNA, 38 nt, Artificial Sequence
  Description of Artificial Sequence:  Enzymatic Nucleic Acid
  misc_feature (31)..(31): n stands for inosine
guaacucccugaugaggccguuaggccgaangucauuu

SEQ ID NO: 13713 - RNA, 38 nt, Artificial Sequence
  Description of Artificial Sequence:  Enzymatic Nucleic Acid
  misc_feature (31)..(31): n stands for inosine
uucaucagcugaugaggccguuaggccgaanuaacucc

SEQ ID NO: 13714 - RNA, 38 nt, Artificial Sequence
  Description of Artificial Sequence:  Enzymatic Nucleic Acid
  misc_feature (31)..(31): n stands for inosine
uuucaucacugaugaggccguuaggccgaanguaacuc

SEQ ID NO: 13715 - RNA, 38 nt, Artificial Sequence
  Description of Artificial Sequence:  Enzymatic Nucleic Acid
  misc_feature (31)..(31): n stands for inosine
uuuucauccugaugaggccguuaggccgaangguaacu

SEQ ID NO: 13716 - RNA, 38 nt, Artificial Sequence
  Description of Artificial Sequence:  Enzymatic Nucleic Acid
  misc_feature (31)..(31): n stands for inosine
cuuacggacugaugaggccguuaggccgaancucucuu

SEQ ID NO: 13717 - RNA, 38 nt, Artificial Sequence
  Description of Artificial Sequence:  Enzymatic Nucleic Acid
  misc_feature (31)..(31): n stands for inosine
cgccuuaccugaugaggccguuaggccgaanaagcucu

SEQ ID NO: 13718 - RNA, 38 nt, Artificial Sequence
  Description of Artificial Sequence:  Enzymatic Nucleic Acid
  misc_feature (31)..(31): n stands for inosine
auugcuuucugaugaggccguuaggccgaanucaauuc

SEQ ID NO: 13719 - RNA, 38 nt, Artificial Sequence
  Description of Artificial Sequence:  Enzymatic Nucleic Acid
  misc_feature (31)..(31): n stands for inosine
aauugcuucugaugaggccguuaggccgaangucaauu

SEQ ID NO: 13720 - RNA, 38 nt, Artificial Sequence
  Description of Artificial Sequence:  Enzymatic Nucleic Acid
  misc_feature (31)..(31): n stands for inosine
augggaaucugaugaggccguuaggccgaancuuuggu

SEQ ID NO: 13721 - RNA, 38 nt, Artificial Sequence
  Description of Artificial Sequence:  Enzymatic Nucleic Acid
  misc_feature (31)..(31): n stands for inosine
uuggcaugcugaugaggccguuaggccgaanaauugcu

SEQ ID NO: 13722 - RNA, 38 nt, Artificial Sequence
  Description of Artificial Sequence:  Enzymatic Nucleic Acid
  misc_feature (31)..(31): n stands for inosine
guuggcaucugaugaggccguuaggccgaangaauugc

SEQ ID NO: 13723 - RNA, 38 nt, Artificial Sequence
  Description of Artificial Sequence:  Enzymatic Nucleic Acid
  misc_feature (31)..(31): n stands for inosine
uguuggcacugaugaggccguuaggccgaanggaauug

SEQ ID NO: 13724 - RNA, 38 nt, Artificial Sequence
  Description of Artificial Sequence:  Enzymatic Nucleic Acid
  misc_feature (31)..(31): n stands for inosine
aauauguucugaugaggccguuaggccgaancauggga

SEQ ID NO: 13725 - RNA, 38 nt, Artificial Sequence
  Description of Artificial Sequence:  Enzymatic Nucleic Acid
  misc_feature (31)..(31): n stands for inosine
gaauaugucugaugaggccguuaggccgaangcauggg

SEQ ID NO: 13726 - RNA, 38 nt, Artificial Sequence
  Description of Artificial Sequence:  Enzymatic Nucleic Acid
  misc_feature (31)..(31): n stands for inosine
guagaauacugaugaggccguuaggccgaanuuggcau

SEQ ID NO: 13727 - RNA, 38 nt, Artificial Sequence
  Description of Artificial Sequence:  Enzymatic Nucleic Acid
  misc_feature (31)..(31): n stands for inosine
aacacugucugaugaggccguuaggccgaanaauaugu

SEQ ID NO: 13728 - RNA, 38 nt, Artificial Sequence
  Description of Artificial Sequence:  Enzymatic Nucleic Acid
  misc_feature (31)..(31): n stands for inosine
aagaacaccugaugaggccguuaggccgaanuagaaua

SEQ ID NO: 13729 - RNA, 38 nt, Artificial Sequence
  Description of Artificial Sequence:  Enzymatic Nucleic Acid
  misc_feature (31)..(31): n stands for inosine
caauaguacugaugaggccguuaggccgaanaacacug

SEQ ID NO: 13730 - RNA, 38 nt, Artificial Sequence
  Description of Artificial Sequence:  Enzymatic Nucleic Acid
  misc_feature (31)..(31): n stands for inosine
uugucaaucugaugaggccguuaggccgaanuaagaac

SEQ ID NO: 13731 - RNA, 38 nt, Artificial Sequence
  Description of Artificial Sequence:  Enzymatic Nucleic Acid
  misc_feature (31)..(31): n stands for inosine
cugcauuucugaugaggccguuaggccgaanucaauag

SEQ ID NO: 13732 - RNA, 38 nt, Artificial Sequence
  Description of Artificial Sequence:  Enzymatic Nucleic Acid
  misc_feature (31)..(31): n stands for inosine
cuuuguuccugaugaggccguuaggccgaancauuuug

SEQ ID NO: 13733 - RNA, 38 nt, Artificial Sequence
  Description of Artificial Sequence:  Enzymatic Nucleic Acid
  misc_feature (31)..(31): n stands for inosine
uuugucuucugaugaggccguuaggccgaanuucugca

SEQ ID NO: 13734 - RNA, 38 nt, Artificial Sequence
  Description of Artificial Sequence:  Enzymatic Nucleic Acid
  misc_feature (31)..(31): n stands for inosine
aaguccuucugaugaggccguuaggccgaanucuuugu

SEQ ID NO: 13735 - RNA, 38 nt, Artificial Sequence
  Description of Artificial Sequence:  Enzymatic Nucleic Acid
  misc_feature (31)..(31): n stands for inosine
aaguauaacugaugaggccguuaggccgaanuccuuug

SEQ ID NO: 13736 - RNA, 38 nt, Artificial Sequence
  Description of Artificial Sequence:  Enzymatic Nucleic Acid
  misc_feature (31)..(31): n stands for inosine
acacgacacugaugaggccguuaggccgaanuauaaag

SEQ ID NO: 13737 - RNA, 38 nt, Artificial Sequence
  Description of Artificial Sequence:  Enzymatic Nucleic Acid
  misc_feature (31)..(31): n stands for inosine
ugaaugaucugaugaggccguuaggccgaanuccacuc

SEQ ID NO: 13738 - RNA, 38 nt, Artificial Sequence
  Description of Artificial Sequence:  Enzymatic Nucleic Acid
  misc_feature (31)..(31): n stands for inosine
uugaaugacugaugaggccguuaggccgaanguccacu

SEQ ID NO: 13739 - RNA, 38 nt, Artificial Sequence
  Description of Artificial Sequence:  Enzymatic Nucleic Acid
  misc_feature (31)..(31): n stands for inosine
gauuugaacugaugaggccguuaggccgaanauggucc

SEQ ID NO: 13740 - RNA, 38 nt, Artificial Sequence
  Description of Artificial Sequence:  Enzymatic Nucleic Acid
  misc_feature (31)..(31): n stands for inosine
aacagauucugaugaggccguuaggccgaanaaugaug

SEQ ID NO: 13741 - RNA, 38 nt, Artificial Sequence
  Description of Artificial Sequence:  Enzymatic Nucleic Acid
  misc_feature (31)..(31): n stands for inosine
guguuaaccugaugaggccguuaggccgaanauuugaa

SEQ ID NO: 13742 - RNA, 38 nt, Artificial Sequence
  Description of Artificial Sequence:  Enzymatic Nucleic Acid
  misc_feature (31)..(31): n stands for inosine
cacugaggcugaugaggccguuaggccgaanuuaacag

SEQ ID NO: 13743 - RNA, 38 nt, Artificial Sequence
  Description of Artificial Sequence:  Enzymatic Nucleic Acid
  misc_feature (31)..(31): n stands for inosine
ugcacugacugaugaggccguuaggccgaanuguuaac

SEQ ID NO: 13744 - RNA, 38 nt, Artificial Sequence
  Description of Artificial Sequence:  Enzymatic Nucleic Acid
  misc_feature (31)..(31): n stands for inosine
augcacugcugaugaggccguuaggccgaanguguuaa

SEQ ID NO: 13745 - RNA, 38 nt, Artificial Sequence
  Description of Artificial Sequence:  Enzymatic Nucleic Acid
  misc_feature (31)..(31): n stands for inosine
auaugcaccugaugaggccguuaggccgaanagguguu

SEQ ID NO: 13746 - RNA, 38 nt, Artificial Sequence
  Description of Artificial Sequence:  Enzymatic Nucleic Acid
  misc_feature (31)..(31): n stands for inosine
cauauauacugaugaggccguuaggccgaancacugag

SEQ ID NO: 13747 - RNA, 38 nt, Artificial Sequence
  Description of Artificial Sequence:  Enzymatic Nucleic Acid
  misc_feature (31)..(31): n stands for inosine
gugaugaacugaugaggccguuaggccgaancuuuauc

SEQ ID NO: 13748 - RNA, 38 nt, Artificial Sequence
  Description of Artificial Sequence:  Enzymatic Nucleic Acid
  misc_feature (31)..(31): n stands for inosine
cacagugacugaugaggccguuaggccgaanaaugcuu

SEQ ID NO: 13749 - RNA, 38 nt, Artificial Sequence
  Description of Artificial Sequence:  Enzymatic Nucleic Acid
  misc_feature (31)..(31): n stands for inosine
uuucacagcugaugaggccguuaggccgaanaugaaug

SEQ ID NO: 13750 - RNA, 38 nt, Artificial Sequence
  Description of Artificial Sequence:  Enzymatic Nucleic Acid
  misc_feature (31)..(31): n stands for inosine
uguuucaccugaugaggccguuaggccgaanugaugaa

SEQ ID NO: 13751 - RNA, 38 nt, Artificial Sequence
  Description of Artificial Sequence:  Enzymatic Nucleic Acid
  misc_feature (31)..(31): n stands for inosine
guuuucgacugaugaggccguuaggccgaanuuucaca

SEQ ID NO: 13752 - RNA, 38 nt, Artificial Sequence
  Description of Artificial Sequence:  Enzymatic Nucleic Acid
  misc_feature (31)..(31): n stands for inosine
gcaccugccugaugaggccguuaggccgaanuuuucga

SEQ ID NO: 13753 - RNA, 38 nt, Artificial Sequence
  Description of Artificial Sequence:  Enzymatic Nucleic Acid
  misc_feature (31)..(31): n stands for inosine
caagcacccugaugaggccguuaggccgaancuguuuu

SEQ ID NO: 13754 - RNA, 38 nt, Artificial Sequence
  Description of Artificial Sequence:  Enzymatic Nucleic Acid
  misc_feature (31)..(31): n stands for inosine
cgguuucacugaugaggccguuaggccgaancaccugc

SEQ ID NO: 13755 - RNA, 38 nt, Artificial Sequence
  Description of Artificial Sequence:  Enzymatic Nucleic Acid
  misc_feature (31)..(31): n stands for inosine
ccagcuaccugaugaggccguuaggccgaanuuucaag

SEQ ID NO: 13756 - RNA, 38 nt, Artificial Sequence
  Description of Artificial Sequence:  Enzymatic Nucleic Acid
  misc_feature (31)..(31): n stands for inosine
cgcuugcccugaugaggccguuaggccgaancuacggu

SEQ ID NO: 13757 - RNA, 38 nt, Artificial Sequence
  Description of Artificial Sequence:  Enzymatic Nucleic Acid
  misc_feature (31)..(31): n stands for inosine
agaccgcucugaugaggccguuaggccgaanccagcua

SEQ ID NO: 13758 - RNA, 38 nt, Artificial Sequence
  Description of Artificial Sequence:  Enzymatic Nucleic Acid
  misc_feature (31)..(31): n stands for inosine
agccgguacugaugaggccguuaggccgaanaccgcuu

SEQ ID NO: 13759 - RNA, 38 nt, Artificial Sequence
  Description of Artificial Sequence:  Enzymatic Nucleic Acid
  misc_feature (31)..(31): n stands for inosine
agagagcccugaugaggccguuaggccgaanuaagacc

SEQ ID NO: 13760 - RNA, 38 nt, Artificial Sequence
  Description of Artificial Sequence:  Enzymatic Nucleic Acid
  misc_feature (31)..(31): n stands for inosine
ucauagagcugaugaggccguuaggccgaanccgguaa

SEQ ID NO: 13761 - RNA, 38 nt, Artificial Sequence
  Description of Artificial Sequence:  Enzymatic Nucleic Acid
  misc_feature (31)..(31): n stands for inosine
uuucauagcugaugaggccguuaggccgaanagccggu

SEQ ID NO: 13762 - RNA, 38 nt, Artificial Sequence
  Description of Artificial Sequence:  Enzymatic Nucleic Acid
  misc_feature (31)..(31): n stands for inosine
acuuucaucugaugaggccguuaggccgaanagagccg

SEQ ID NO: 13763 - RNA, 38 nt, Artificial Sequence
  Description of Artificial Sequence:  Enzymatic Nucleic Acid
  misc_feature (31)..(31): n stands for inosine
gagggaaacugaugaggccguuaggccgaanccuucac

SEQ ID NO: 13764 - RNA, 38 nt, Artificial Sequence
  Description of Artificial Sequence:  Enzymatic Nucleic Acid
  misc_feature (31)..(31): n stands for inosine
ccggcgagcugaugaggccguuaggccgaanaaaugcc

SEQ ID NO: 13765 - RNA, 38 nt, Artificial Sequence
  Description of Artificial Sequence:  Enzymatic Nucleic Acid
  misc_feature (31)..(31): n stands for inosine
uccggcgacugaugaggccguuaggccgaangaaaugc

SEQ ID NO: 13766 - RNA, 38 nt, Artificial Sequence
  Description of Artificial Sequence:  Enzymatic Nucleic Acid
  misc_feature (31)..(31): n stands for inosine
uuccggcgcugaugaggccguuaggccgaanggaaaug

SEQ ID NO: 13767 - RNA, 38 nt, Artificial Sequence
  Description of Artificial Sequence:  Enzymatic Nucleic Acid
  misc_feature (31)..(31): n stands for inosine
caacuucccugaugaggccguuaggccgaancgaggga

SEQ ID NO: 13768 - RNA, 38 nt, Artificial Sequence
  Description of Artificial Sequence:  Enzymatic Nucleic Acid
  misc_feature (31)..(31): n stands for inosine
cagucgcacugaugaggccguuaggccgaanuaaccca

SEQ ID NO: 13769 - RNA, 38 nt, Artificial Sequence
  Description of Artificial Sequence:  Enzymatic Nucleic Acid
  misc_feature (31)..(31): n stands for inosine
ucagucgccugaugaggccguuaggccgaanguaaccc

SEQ ID NO: 13770 - RNA, 38 nt, Artificial Sequence
  Description of Artificial Sequence:  Enzymatic Nucleic Acid
  misc_feature (31)..(31): n stands for inosine
gauuucuccugaugaggccguuaggccgaanucgcagg

SEQ ID NO: 13771 - RNA, 38 nt, Artificial Sequence
  Description of Artificial Sequence:  Enzymatic Nucleic Acid
  misc_feature (31)..(31): n stands for inosine
uagcgagccugaugaggccguuaggccgaanauuucuc

SEQ ID NO: 13772 - RNA, 38 nt, Artificial Sequence
  Description of Artificial Sequence:  Enzymatic Nucleic Acid
  misc_feature (31)..(31): n stands for inosine
aaauagcgcugaugaggccguuaggccgaancagauuu

SEQ ID NO: 13773 - RNA, 38 nt, Artificial Sequence
  Description of Artificial Sequence:  Enzymatic Nucleic Acid
  misc_feature (31)..(31): n stands for inosine
agucaaaucugaugaggccguuaggccgaancgagcag

SEQ ID NO: 13774 - RNA, 38 nt, Artificial Sequence
  Description of Artificial Sequence:  Enzymatic Nucleic Acid
  misc_feature (31)..(31): n stands for inosine
uagccacgcugaugaggccguuaggccgaanucaaaua

SEQ ID NO: 13775 - RNA, 38 nt, Artificial Sequence
  Description of Artificial Sequence:  Enzymatic Nucleic Acid
  misc_feature (31)..(31): n stands for inosine
uaacgagucugaugaggccguuaggccgaanccacgag

SEQ ID NO: 13776 - RNA, 38 nt, Artificial Sequence
  Description of Artificial Sequence:  Enzymatic Nucleic Acid
  misc_feature (31)..(31): n stands for inosine
aauuaacgcugaugaggccguuaggccgaanuagccac

SEQ ID NO: 13777 - RNA, 38 nt, Artificial Sequence
  Description of Artificial Sequence:  Enzymatic Nucleic Acid
  misc_feature (31)..(31): n stands for inosine
uacguccucugaugaggccguuaggccgaanauaauua

SEQ ID NO: 13778 - RNA, 38 nt, Artificial Sequence
  Description of Artificial Sequence:  Enzymatic Nucleic Acid
  misc_feature (31)..(31): n stands for inosine
uccucuuccugaugaggccguuaggccgaanuuacguc

SEQ ID NO: 13779 - RNA, 38 nt, Artificial Sequence
  Description of Artificial Sequence:  Enzymatic Nucleic Acid
  misc_feature (31)..(31): n stands for inosine
uaauuccccugaugaggccguuaggccgaancauccuc

SEQ ID NO: 13780 - RNA, 38 nt, Artificial Sequence
  Description of Artificial Sequence:  Enzymatic Nucleic Acid
  misc_feature (31)..(31): n stands for inosine
agcaagaucugaugaggccguuaggccgaanuauaauu

SEQ ID NO: 13781 - RNA, 38 nt, Artificial Sequence
  Description of Artificial Sequence:  Enzymatic Nucleic Acid
  misc_feature (31)..(31): n stands for inosine
gcucagcacugaugaggccguuaggccgaanauuguau

SEQ ID NO: 13782 - RNA, 38 nt, Artificial Sequence
  Description of Artificial Sequence:  Enzymatic Nucleic Acid
  misc_feature (31)..(31): n stands for inosine
uuaugcuccugaugaggccguuaggccgaancaagauu

SEQ ID NO: 13783 - RNA, 38 nt, Artificial Sequence
  Description of Artificial Sequence:  Enzymatic Nucleic Acid
  misc_feature (31)..(31): n stands for inosine
cuguuuuacugaugaggccguuaggccgaancucagca

SEQ ID NO: 13784 - RNA, 38 nt, Artificial Sequence
  Description of Artificial Sequence:  Enzymatic Nucleic Acid
  misc_feature (31)..(31): n stands for inosine
cauuugaccugaugaggccguuaggccgaanuuuuaug

SEQ ID NO: 13785 - RNA, 38 nt, Artificial Sequence
  Description of Artificial Sequence:  Enzymatic Nucleic Acid
  misc_feature (31)..(31): n stands for inosine
aacacauucugaugaggccguuaggccgaanacuguuu

SEQ ID NO: 13786 - RNA, 38 nt, Artificial Sequence
  Description of Artificial Sequence:  Enzymatic Nucleic Acid
  misc_feature (31)..(31): n stands for inosine
ggcagugacugaugaggccguuaggccgaanuuuuuaa

SEQ ID NO: 13787 - RNA, 38 nt, Artificial Sequence
  Description of Artificial Sequence:  Enzymatic Nucleic Acid
  misc_feature (31)..(31): n stands for inosine
uggcagugcugaugaggccguuaggccgaanguuuuua

SEQ ID NO: 13788 - RNA, 38 nt, Artificial Sequence
  Description of Artificial Sequence:  Enzymatic Nucleic Acid
  misc_feature (31)..(31): n stands for inosine
aguggcagcugaugaggccguuaggccgaanagguuuu

SEQ ID NO: 13789 - RNA, 38 nt, Artificial Sequence
  Description of Artificial Sequence:  Enzymatic Nucleic Acid
  misc_feature (31)..(31): n stands for inosine
agaguggccugaugaggccguuaggccgaanugagguu

SEQ ID NO: 13790 - RNA, 38 nt, Artificial Sequence
  Description of Artificial Sequence:  Enzymatic Nucleic Acid
  misc_feature (31)..(31): n stands for inosine
auuagagucugaugaggccguuaggccgaancagugag

SEQ ID NO: 13791 - RNA, 38 nt, Artificial Sequence
  Description of Artificial Sequence:  Enzymatic Nucleic Acid
  misc_feature (31)..(31): n stands for inosine
aauuagagcugaugaggccguuaggccgaangcaguga

SEQ ID NO: 13792 - RNA, 38 nt, Artificial Sequence
  Description of Artificial Sequence:  Enzymatic Nucleic Acid
  misc_feature (31)..(31): n stands for inosine
acaauuagcugaugaggccguuaggccgaanuggcagu

SEQ ID NO: 13793 - RNA, 38 nt, Artificial Sequence
  Description of Artificial Sequence:  Enzymatic Nucleic Acid
  misc_feature (31)..(31): n stands for inosine
ugacaauucugaugaggccguuaggccgaanaguggca

SEQ ID NO: 13794 - RNA, 38 nt, Artificial Sequence
  Description of Artificial Sequence:  Enzymatic Nucleic Acid
  misc_feature (31)..(31): n stands for inosine
uuucacaucugaugaggccguuaggccgaanacaauua

SEQ ID NO: 13795 - RNA, 38 nt, Artificial Sequence
  Description of Artificial Sequence:  Enzymatic Nucleic Acid
  misc_feature (31)..(31): n stands for inosine
aaaucuggcugaugaggccguuaggccgaanuuucaca

SEQ ID NO: 13796 - RNA, 38 nt, Artificial Sequence
  Description of Artificial Sequence:  Enzymatic Nucleic Acid
  misc_feature (31)..(31): n stands for inosine
uaaaucugcugaugaggccguuaggccgaanguuucac

SEQ ID NO: 13797 - RNA, 38 nt, Artificial Sequence
  Description of Artificial Sequence:  Enzymatic Nucleic Acid
  misc_feature (31)..(31): n stands for inosine
guaaaucucugaugaggccguuaggccgaangguuuca

SEQ ID NO: 13798 - RNA, 38 nt, Artificial Sequence
  Description of Artificial Sequence:  Enzymatic Nucleic Acid
  misc_feature (31)..(31): n stands for inosine
cguaaauccugaugaggccguuaggccgaanggguuuc

SEQ ID NO: 13799 - RNA, 38 nt, Artificial Sequence
  Description of Artificial Sequence:  Enzymatic Nucleic Acid
  misc_feature (31)..(31): n stands for inosine
gaugacaccugaugaggccguuaggccgaanccuuuuc

SEQ ID NO: 13800 - RNA, 38 nt, Artificial Sequence
  Description of Artificial Sequence:  Enzymatic Nucleic Acid
  misc_feature (31)..(31): n stands for inosine
ggaaacgacugaugaggccguuaggccgaanacacggc

SEQ ID NO: 13801 - RNA, 38 nt, Artificial Sequence
  Description of Artificial Sequence:  Enzymatic Nucleic Acid
  misc_feature (31)..(31): n stands for inosine
ccgggucucugaugaggccguuaggccgaanaaacgau

SEQ ID NO: 13802 - RNA, 38 nt, Artificial Sequence
  Description of Artificial Sequence:  Enzymatic Nucleic Acid
  misc_feature (31)..(31): n stands for inosine
gccggguccugaugaggccguuaggccgaangaaacga

SEQ ID NO: 13803 - RNA, 38 nt, Artificial Sequence
  Description of Artificial Sequence:  Enzymatic Nucleic Acid
  misc_feature (31)..(31): n stands for inosine
gagagccgcugaugaggccguuaggccgaanucuggaa

SEQ ID NO: 13804 - RNA, 38 nt, Artificial Sequence
  Description of Artificial Sequence:  Enzymatic Nucleic Acid
  misc_feature (31)..(31): n stands for inosine
agagagcccugaugaggccguuaggccgaangucugga

SEQ ID NO: 13805 - RNA, 38 nt, Artificial Sequence
  Description of Artificial Sequence:  Enzymatic Nucleic Acid
  misc_feature (31)..(31): n stands for inosine
ggguagagcugaugaggccguuaggccgaanccggguc

SEQ ID NO: 13806 - RNA, 38 nt, Artificial Sequence
  Description of Artificial Sequence:  Enzymatic Nucleic Acid
  misc_feature (31)..(31): n stands for inosine
guggguagcugaugaggccguuaggccgaanagccggg

SEQ ID NO: 13807 - RNA, 38 nt, Artificial Sequence
  Description of Artificial Sequence:  Enzymatic Nucleic Acid
  misc_feature (31)..(31): n stands for inosine
cagugggucugaugaggccguuaggccgaanagagccg

SEQ ID NO: 13808 - RNA, 38 nt, Artificial Sequence
  Description of Artificial Sequence:  Enzymatic Nucleic Acid
  misc_feature (31)..(31): n stands for inosine
gcccagugcugaugaggccguuaggccgaanuagagag

SEQ ID NO: 13809 - RNA, 38 nt, Artificial Sequence
  Description of Artificial Sequence:  Enzymatic Nucleic Acid
  misc_feature (31)..(31): n stands for inosine
ugcccagucugaugaggccguuaggccgaanguagaga

SEQ ID NO: 13810 - RNA, 38 nt, Artificial Sequence
  Description of Artificial Sequence:  Enzymatic Nucleic Acid
  misc_feature (31)..(31): n stands for inosine
cugcccagcugaugaggccguuaggccgaangguagag

SEQ ID NO: 13811 - RNA, 38 nt, Artificial Sequence
  Description of Artificial Sequence:  Enzymatic Nucleic Acid
  misc_feature (31)..(31): n stands for inosine
ugcugccccugaugaggccguuaggccgaanuggguag

SEQ ID NO: 13812 - RNA, 38 nt, Artificial Sequence
  Description of Artificial Sequence:  Enzymatic Nucleic Acid
  misc_feature (31)..(31): n stands for inosine
uugucugccugaugaggccguuaggccgaancccagug

SEQ ID NO: 13813 - RNA, 38 nt, Artificial Sequence
  Description of Artificial Sequence:  Enzymatic Nucleic Acid
  misc_feature (31)..(31): n stands for inosine
gauuuguccugaugaggccguuaggccgaancugccca

SEQ ID NO: 13814 - RNA, 38 nt, Artificial Sequence
  Description of Artificial Sequence:  Enzymatic Nucleic Acid
  misc_feature (31)..(31): n stands for inosine
ucaggauucugaugaggccguuaggccgaanucugcug

SEQ ID NO: 13815 - RNA, 38 nt, Artificial Sequence
  Description of Artificial Sequence:  Enzymatic Nucleic Acid
  misc_feature (31)..(31): n stands for inosine
acaagucacugaugaggccguuaggccgaanauuuguc

SEQ ID NO: 13816 - RNA, 38 nt, Artificial Sequence
  Description of Artificial Sequence:  Enzymatic Nucleic Acid
  misc_feature (31)..(31): n stands for inosine
uacaaguccugaugaggccguuaggccgaangauuugu

SEQ ID NO: 13817 - RNA, 38 nt, Artificial Sequence
  Description of Artificial Sequence:  Enzymatic Nucleic Acid
  misc_feature (31)..(31): n stands for inosine
gcgguacacugaugaggccguuaggccgaanucaggau

SEQ ID NO: 13818 - RNA, 38 nt, Artificial Sequence
  Description of Artificial Sequence:  Enzymatic Nucleic Acid
  misc_feature (31)..(31): n stands for inosine
ccauaugccugaugaggccguuaggccgaanuacaagu

SEQ ID NO: 13819 - RNA, 38 nt, Artificial Sequence
  Description of Artificial Sequence:  Enzymatic Nucleic Acid
  misc_feature (31)..(31): n stands for inosine
auaccauacugaugaggccguuaggccgaancgguaca

SEQ ID NO: 13820 - RNA, 38 nt, Artificial Sequence
  Description of Artificial Sequence:  Enzymatic Nucleic Acid
  misc_feature (31)..(31): n stands for inosine
agguugagcugaugaggccguuaggccgaanauaccau

SEQ ID NO: 13821 - RNA, 38 nt, Artificial Sequence
  Description of Artificial Sequence:  Enzymatic Nucleic Acid
  misc_feature (31)..(31): n stands for inosine
uagguugacugaugaggccguuaggccgaangauacca

SEQ ID NO: 13822 - RNA, 38 nt, Artificial Sequence
  Description of Artificial Sequence:  Enzymatic Nucleic Acid
  misc_feature (31)..(31): n stands for inosine
guagguugcugaugaggccguuaggccgaanggauacc

SEQ ID NO: 13823 - RNA, 38 nt, Artificial Sequence
  Description of Artificial Sequence:  Enzymatic Nucleic Acid
  misc_feature (31)..(31): n stands for inosine
uuguaggucugaugaggccguuaggccgaanagggaua

SEQ ID NO: 13824 - RNA, 38 nt, Artificial Sequence
  Description of Artificial Sequence:  Enzymatic Nucleic Acid
  misc_feature (31)..(31): n stands for inosine
ugauuguacugaugaggccguuaggccgaanuugaggg

SEQ ID NO: 13825 - RNA, 38 nt, Artificial Sequence
  Description of Artificial Sequence:  Enzymatic Nucleic Acid
  misc_feature (31)..(31): n stands for inosine
uugauugucugaugaggccguuaggccgaanguugagg

SEQ ID NO: 13826 - RNA, 38 nt, Artificial Sequence
  Description of Artificial Sequence:  Enzymatic Nucleic Acid
  misc_feature (31)..(31): n stands for inosine
cacuugaucugaugaggccguuaggccgaanuagguug

SEQ ID NO: 13827 - RNA, 38 nt, Artificial Sequence
  Description of Artificial Sequence:  Enzymatic Nucleic Acid
  misc_feature (31)..(31): n stands for inosine
gaaccacucugaugaggccguuaggccgaanauuguag

SEQ ID NO: 13828 - RNA, 38 nt, Artificial Sequence
  Description of Artificial Sequence:  Enzymatic Nucleic Acid
  misc_feature (31)..(31): n stands for inosine
ggggugcccugaugaggccguuaggccgaanaaccacu

SEQ ID NO: 13829 - RNA, 38 nt, Artificial Sequence
  Description of Artificial Sequence:  Enzymatic Nucleic Acid
  misc_feature (31)..(31): n stands for inosine
uacaggggcugaugaggccguuaggccgaanccagaac

SEQ ID NO: 13830 - RNA, 38 nt, Artificial Sequence
  Description of Artificial Sequence:  Enzymatic Nucleic Acid
  misc_feature (31)..(31): n stands for inosine
guuacaggcugaugaggccguuaggccgaanugccaga

SEQ ID NO: 13831 - RNA, 38 nt, Artificial Sequence
  Description of Artificial Sequence:  Enzymatic Nucleic Acid
  misc_feature (31)..(31): n stands for inosine
gguuacagcugaugaggccguuaggccgaangugccag

SEQ ID NO: 13832 - RNA, 38 nt, Artificial Sequence
  Description of Artificial Sequence:  Enzymatic Nucleic Acid
  misc_feature (31)..(31): n stands for inosine
ugguuacacugaugaggccguuaggccgaanggugcca

SEQ ID NO: 13833 - RNA, 38 nt, Artificial Sequence
  Description of Artificial Sequence:  Enzymatic Nucleic Acid
  misc_feature (31)..(31): n stands for inosine
augguuaccugaugaggccguuaggccgaangggugcc

SEQ ID NO: 13834 - RNA, 38 nt, Artificial Sequence
  Description of Artificial Sequence:  Enzymatic Nucleic Acid
  misc_feature (31)..(31): n stands for inosine
augauuaucugaugaggccguuaggccgaanuuacagg

SEQ ID NO: 13835 - RNA, 38 nt, Artificial Sequence
  Description of Artificial Sequence:  Enzymatic Nucleic Acid
  misc_feature (31)..(31): n stands for inosine
aaugauuacugaugaggccguuaggccgaanguuacag

SEQ ID NO: 13836 - RNA, 38 nt, Artificial Sequence
  Description of Artificial Sequence:  Enzymatic Nucleic Acid
  misc_feature (31)..(31): n stands for inosine
cuucggaacugaugaggccguuaggccgaanauuaugg

SEQ ID NO: 13837 - RNA, 38 nt, Artificial Sequence
  Description of Artificial Sequence:  Enzymatic Nucleic Acid
  misc_feature (31)..(31): n stands for inosine
cuugcuuccugaugaggccguuaggccgaanaaugauu

SEQ ID NO: 13838 - RNA, 38 nt, Artificial Sequence
  Description of Artificial Sequence:  Enzymatic Nucleic Acid
  misc_feature (31)..(31): n stands for inosine
ucacaccucugaugaggccguuaggccgaancuucgga

SEQ ID NO: 13839 - RNA, 38 nt, Artificial Sequence
  Description of Artificial Sequence:  Enzymatic Nucleic Acid
  misc_feature (31)..(31): n stands for inosine
ggaacaaacugaugaggccguuaggccgaanucacacc

SEQ ID NO: 13840 - RNA, 38 nt, Artificial Sequence
  Description of Artificial Sequence:  Enzymatic Nucleic Acid
  misc_feature (31)..(31): n stands for inosine
ucauuauucugaugaggccguuaggccgaanaacaaaa

SEQ ID NO: 13841 - RNA, 38 nt, Artificial Sequence
  Description of Artificial Sequence:  Enzymatic Nucleic Acid
  misc_feature (31)..(31): n stands for inosine
uucauuaucugaugaggccguuaggccgaangaacaaa

SEQ ID NO: 13842 - RNA, 38 nt, Artificial Sequence
  Description of Artificial Sequence:  Enzymatic Nucleic Acid
  misc_feature (31)..(31): n stands for inosine
aggauaaacugaugaggccguuaggccgaanacucuuc

SEQ ID NO: 13843 - RNA, 38 nt, Artificial Sequence
  Description of Artificial Sequence:  Enzymatic Nucleic Acid
  misc_feature (31)..(31): n stands for inosine
caggauaacugaugaggccguuaggccgaangacucuu

SEQ ID NO: 13844 - RNA, 38 nt, Artificial Sequence
  Description of Artificial Sequence:  Enzymatic Nucleic Acid
  misc_feature (31)..(31): n stands for inosine
agcauccacugaugaggccguuaggccgaanauaaagg

SEQ ID NO: 13845 - RNA, 38 nt, Artificial Sequence
  Description of Artificial Sequence:  Enzymatic Nucleic Acid
  misc_feature (31)..(31): n stands for inosine
cagcaucccugaugaggccguuaggccgaangauaaag

SEQ ID NO: 13846 - RNA, 38 nt, Artificial Sequence
  Description of Artificial Sequence:  Enzymatic Nucleic Acid
  misc_feature (31)..(31): n stands for inosine
uugcuguccugaugaggccguuaggccgaancauccag

SEQ ID NO: 13847 - RNA, 38 nt, Artificial Sequence
  Description of Artificial Sequence:  Enzymatic Nucleic Acid
  misc_feature (31)..(31): n stands for inosine
cauguugccugaugaggccguuaggccgaanucagcau

SEQ ID NO: 13848 - RNA, 38 nt, Artificial Sequence
  Description of Artificial Sequence:  Enzymatic Nucleic Acid
  misc_feature (31)..(31): n stands for inosine
ucccaugucugaugaggccguuaggccgaancugucag

SEQ ID NO: 13849 - RNA, 38 nt, Artificial Sequence
  Description of Artificial Sequence:  Enzymatic Nucleic Acid
  misc_feature (31)..(31): n stands for inosine
guuucccacugaugaggccguuaggccgaanuugcugu

SEQ ID NO: 13850 - RNA, 38 nt, Artificial Sequence
  Description of Artificial Sequence:  Enzymatic Nucleic Acid
  misc_feature (31)..(31): n stands for inosine
cucaauuccugaugaggccguuaggccgaanuuuccca

SEQ ID NO: 13851 - RNA, 38 nt, Artificial Sequence
  Description of Artificial Sequence:  Enzymatic Nucleic Acid
  misc_feature (31)..(31): n stands for inosine
cugagugacugaugaggccguuaggccgaancucucaa

SEQ ID NO: 13852 - RNA, 38 nt, Artificial Sequence
  Description of Artificial Sequence:  Enzymatic Nucleic Acid
  misc_feature (31)..(31): n stands for inosine
gcgcugagcugaugaggccguuaggccgaanaugcucu

SEQ ID NO: 13853 - RNA, 38 nt, Artificial Sequence
  Description of Artificial Sequence:  Enzymatic Nucleic Acid
  misc_feature (31)..(31): n stands for inosine
augcgcugcugaugaggccguuaggccgaanugaugcu

SEQ ID NO: 13854 - RNA, 38 nt, Artificial Sequence
  Description of Artificial Sequence:  Enzymatic Nucleic Acid
  misc_feature (31)..(31): n stands for inosine
ccaugcgccugaugaggccguuaggccgaanagugaug

SEQ ID NO: 13855 - RNA, 38 nt, Artificial Sequence
  Description of Artificial Sequence:  Enzymatic Nucleic Acid
  misc_feature (31)..(31): n stands for inosine
uauugccacugaugaggccguuaggccgaancgcugag

SEQ ID NO: 13856 - RNA, 38 nt, Artificial Sequence
  Description of Artificial Sequence:  Enzymatic Nucleic Acid
  misc_feature (31)..(31): n stands for inosine
ucuauuaucugaugaggccguuaggccgaanccaugcg

SEQ ID NO: 13857 - RNA, 38 nt, Artificial Sequence
  Description of Artificial Sequence:  Enzymatic Nucleic Acid
  misc_feature (31)..(31): n stands for inosine
aaggugcucugaugaggccguuaggccgaanccaucuu

SEQ ID NO: 13858 - RNA, 38 nt, Artificial Sequence
  Description of Artificial Sequence:  Enzymatic Nucleic Acid
  misc_feature (31)..(31): n stands for inosine
aaccaaggcugaugaggccguuaggccgaancuagcca

SEQ ID NO: 13859 - RNA, 38 nt, Artificial Sequence
  Description of Artificial Sequence:  Enzymatic Nucleic Acid
  misc_feature (31)..(31): n stands for inosine
acaaccaacugaugaggccguuaggccgaanugcuagc

SEQ ID NO: 13860 - RNA, 38 nt, Artificial Sequence
  Description of Artificial Sequence:  Enzymatic Nucleic Acid
  misc_feature (31)..(31): n stands for inosine
cacaaccacugaugaggccguuaggccgaangugcuag

SEQ ID NO: 13861 - RNA, 38 nt, Artificial Sequence
  Description of Artificial Sequence:  Enzymatic Nucleic Acid
  misc_feature (31)..(31): n stands for inosine
cuagaguccugaugaggccguuaggccgaanccacaac

SEQ ID NO: 13862 - RNA, 38 nt, Artificial Sequence
  Description of Artificial Sequence:  Enzymatic Nucleic Acid
  misc_feature (31)..(31): n stands for inosine
aauucuagcugaugaggccguuaggccgaanucagcca

SEQ ID NO: 13863 - RNA, 38 nt, Artificial Sequence
  Description of Artificial Sequence:  Enzymatic Nucleic Acid
  misc_feature (31)..(31): n stands for inosine
gaaauucucugaugaggccguuaggccgaanagucagc

SEQ ID NO: 13864 - RNA, 38 nt, Artificial Sequence
  Description of Artificial Sequence:  Enzymatic Nucleic Acid
  misc_feature (31)..(31): n stands for inosine
uagauucccugaugaggccguuaggccgaanaaauucu

SEQ ID NO: 13865 - RNA, 38 nt, Artificial Sequence
  Description of Artificial Sequence:  Enzymatic Nucleic Acid
  misc_feature (31)..(31): n stands for inosine
gcaaaugucugaugaggccguuaggccgaanauuccag

SEQ ID NO: 13866 - RNA, 38 nt, Artificial Sequence
  Description of Artificial Sequence:  Enzymatic Nucleic Acid
  misc_feature (31)..(31): n stands for inosine
uaugcaaacugaugaggccguuaggccgaanuagauuc

SEQ ID NO: 13867 - RNA, 38 nt, Artificial Sequence
  Description of Artificial Sequence:  Enzymatic Nucleic Acid
  misc_feature (31)..(31): n stands for inosine
ggaagcuacugaugaggccguuaggccgaancaaaugu

SEQ ID NO: 13868 - RNA, 38 nt, Artificial Sequence
  Description of Artificial Sequence:  Enzymatic Nucleic Acid
  misc_feature (31)..(31): n stands for inosine
uuauuggacugaugaggccguuaggccgaancuaugca

SEQ ID NO: 13869 - RNA, 38 nt, Artificial Sequence
  Description of Artificial Sequence:  Enzymatic Nucleic Acid
  misc_feature (31)..(31): n stands for inosine
acuuuauucugaugaggccguuaggccgaanaagcuau

SEQ ID NO: 13870 - RNA, 38 nt, Artificial Sequence
  Description of Artificial Sequence:  Enzymatic Nucleic Acid
  misc_feature (31)..(31): n stands for inosine
aacuuuaucugaugaggccguuaggccgaangaagcua

SEQ ID NO: 13871 - RNA, 38 nt, Artificial Sequence
  Description of Artificial Sequence:  Enzymatic Nucleic Acid
  misc_feature (31)..(31): n stands for inosine
cuucccaccugaugaggccguuaggccgaanucccaac

SEQ ID NO: 13872 - RNA, 38 nt, Artificial Sequence
  Description of Artificial Sequence:  Enzymatic Nucleic Acid
  misc_feature (31)..(31): n stands for inosine
aaagcuuacugaugaggccguuaggccgaanuuucuuc

SEQ ID NO: 13873 - RNA, 38 nt, Artificial Sequence
  Description of Artificial Sequence:  Enzymatic Nucleic Acid
  misc_feature (31)..(31): n stands for inosine
gauauaaacugaugaggccguuaggccgaancuuaugu

SEQ ID NO: 13874 - RNA, 38 nt, Artificial Sequence
  Description of Artificial Sequence:  Enzymatic Nucleic Acid
  misc_feature (31)..(31): n stands for inosine
cacaucugcugaugaggccguuaggccgaanauauaaa

SEQ ID NO: 13875 - RNA, 38 nt, Artificial Sequence
  Description of Artificial Sequence:  Enzymatic Nucleic Acid
  misc_feature (31)..(31): n stands for inosine
ggcacauccugaugaggccguuaggccgaanugauaua

SEQ ID NO: 13876 - RNA, 38 nt, Artificial Sequence
  Description of Artificial Sequence:  Enzymatic Nucleic Acid
  misc_feature (31)..(31): n stands for inosine
acccauuucugaugaggccguuaggccgaancacaucu

SEQ ID NO: 13877 - RNA, 38 nt, Artificial Sequence
  Description of Artificial Sequence:  Enzymatic Nucleic Acid
  misc_feature (31)..(31): n stands for inosine
aacccauucugaugaggccguuaggccgaangcacauc

SEQ ID NO: 13878 - RNA, 38 nt, Artificial Sequence
  Description of Artificial Sequence:  Enzymatic Nucleic Acid
  misc_feature (31)..(31): n stands for inosine
aguuaacacugaugaggccguuaggccgaanaaaccca

SEQ ID NO: 13879 - RNA, 38 nt, Artificial Sequence
  Description of Artificial Sequence:  Enzymatic Nucleic Acid
  misc_feature (31)..(31): n stands for inosine
uuuuuccacugaugaggccguuaggccgaanuuaacau

SEQ ID NO: 13880 - RNA, 38 nt, Artificial Sequence
  Description of Artificial Sequence:  Enzymatic Nucleic Acid
  misc_feature (31)..(31): n stands for inosine
cuuccguccugaugaggccguuaggccgaancauuuuu

SEQ ID NO: 13881 - RNA, 38 nt, Artificial Sequence
  Description of Artificial Sequence:  Enzymatic Nucleic Acid
  misc_feature (31)..(31): n stands for inosine
caguuucacugaugaggccguuaggccgaanuccucuc

SEQ ID NO: 13882 - RNA, 38 nt, Artificial Sequence
  Description of Artificial Sequence:  Enzymatic Nucleic Acid
  misc_feature (31)..(31): n stands for inosine
acaguuuccugaugaggccguuaggccgaanguccucu

SEQ ID NO: 13883 - RNA, 38 nt, Artificial Sequence
  Description of Artificial Sequence:  Enzymatic Nucleic Acid
  misc_feature (31)..(31): n stands for inosine
ugcaagaccugaugaggccguuaggccgaanuuucagg

SEQ ID NO: 13884 - RNA, 38 nt, Artificial Sequence
  Description of Artificial Sequence:  Enzymatic Nucleic Acid
  misc_feature (31)..(31): n stands for inosine
acugugcacugaugaggccguuaggccgaanacaguuu

SEQ ID NO: 13885 - RNA, 38 nt, Artificial Sequence
  Description of Artificial Sequence:  Enzymatic Nucleic Acid
  misc_feature (31)..(31): n stands for inosine
guuaacugcugaugaggccguuaggccgaancaagaca

SEQ ID NO: 13886 - RNA, 38 nt, Artificial Sequence
  Description of Artificial Sequence:  Enzymatic Nucleic Acid
  misc_feature (31)..(31): n stands for inosine
uuguuaaccugaugaggccguuaggccgaanugcaaga

SEQ ID NO: 13887 - RNA, 38 nt, Artificial Sequence
  Description of Artificial Sequence:  Enzymatic Nucleic Acid
  misc_feature (31)..(31): n stands for inosine
uaagaacucugaugaggccguuaggccgaanuuaacug

SEQ ID NO: 13888 - RNA, 38 nt, Artificial Sequence
  Description of Artificial Sequence:  Enzymatic Nucleic Acid
  misc_feature (31)..(31): n stands for inosine
ucuguauacugaugaggccguuaggccgaanaacuugu

SEQ ID NO: 13889 - RNA, 38 nt, Artificial Sequence
  Description of Artificial Sequence:  Enzymatic Nucleic Acid
  misc_feature (31)..(31): n stands for inosine
aacgucuccugaugaggccguuaggccgaanuauaaga

SEQ ID NO: 13890 - RNA, 38 nt, Artificial Sequence
  Description of Artificial Sequence:  Enzymatic Nucleic Acid
  misc_feature (31)..(31): n stands for inosine
aaaauccacugaugaggccguuaggccgaanuaacguc

SEQ ID NO: 13891 - RNA, 38 nt, Artificial Sequence
  Description of Artificial Sequence:  Enzymatic Nucleic Acid
  misc_feature (31)..(31): n stands for inosine
cuguccgccugaugaggccguuaggccgaanuaaaauc

SEQ ID NO: 13892 - RNA, 38 nt, Artificial Sequence
  Description of Artificial Sequence:  Enzymatic Nucleic Acid
  misc_feature (31)..(31): n stands for inosine
uuauuaaccugaugaggccguuaggccgaanuccgcag

SEQ ID NO: 13893 - RNA, 38 nt, Artificial Sequence
  Description of Artificial Sequence:  Enzymatic Nucleic Acid
  misc_feature (31)..(31): n stands for inosine
cauuguuccugaugaggccguuaggccgaanuuauuaa

SEQ ID NO: 13894 - RNA, 38 nt, Artificial Sequence
  Description of Artificial Sequence:  Enzymatic Nucleic Acid
  misc_feature (31)..(31): n stands for inosine
uagugcaucugaugaggccguuaggccgaanuucuguu

SEQ ID NO: 13895 - RNA, 38 nt, Artificial Sequence
  Description of Artificial Sequence:  Enzymatic Nucleic Acid
  misc_feature (31)..(31): n stands for inosine
uacuguagcugaugaggccguuaggccgaancauuguu

SEQ ID NO: 13896 - RNA, 38 nt, Artificial Sequence
  Description of Artificial Sequence:  Enzymatic Nucleic Acid
  misc_feature (31)..(31): n stands for inosine
aauacugucugaugaggccguuaggccgaanugcauug

SEQ ID NO: 13897 - RNA, 38 nt, Artificial Sequence
  Description of Artificial Sequence:  Enzymatic Nucleic Acid
  misc_feature (31)..(31): n stands for inosine
gcuaauaccugaugaggccguuaggccgaanuagugca

SEQ ID NO: 13898 - RNA, 38 nt, Artificial Sequence
  Description of Artificial Sequence:  Enzymatic Nucleic Acid
  misc_feature (31)..(31): n stands for inosine
uuuuugcucugaugaggccguuaggccgaancuaauac

SEQ ID NO: 13899 - RNA, 38 nt, Artificial Sequence
  Description of Artificial Sequence:  Enzymatic Nucleic Acid
  misc_feature (31)..(31): n stands for inosine
ccauuuuucugaugaggccguuaggccgaancuugcua

SEQ ID NO: 13900 - RNA, 38 nt, Artificial Sequence
  Description of Artificial Sequence:  Enzymatic Nucleic Acid
  misc_feature (31)..(31): n stands for inosine
uuagugaucugaugaggccguuaggccgaanccauuuu

SEQ ID NO: 13901 - RNA, 38 nt, Artificial Sequence
  Description of Artificial Sequence:  Enzymatic Nucleic Acid
  misc_feature (31)..(31): n stands for inosine
cuuagugacugaugaggccguuaggccgaangccauuu

SEQ ID NO: 13902 - RNA, 38 nt, Artificial Sequence
  Description of Artificial Sequence:  Enzymatic Nucleic Acid
  misc_feature (31)..(31): n stands for inosine
cuccuuagcugaugaggccguuaggccgaanauggcca

SEQ ID NO: 13903 - RNA, 38 nt, Artificial Sequence
  Description of Artificial Sequence:  Enzymatic Nucleic Acid
  misc_feature (31)..(31): n stands for inosine
ugcuccuucugaugaggccguuaggccgaanugauggc

SEQ ID NO: 13904 - RNA, 38 nt, Artificial Sequence
  Description of Artificial Sequence:  Enzymatic Nucleic Acid
  misc_feature (31)..(31): n stands for inosine
ugauggagcugaugaggccguuaggccgaancuccuua

SEQ ID NO: 13905 - RNA, 38 nt, Artificial Sequence
  Description of Artificial Sequence:  Enzymatic Nucleic Acid
  misc_feature (31)..(31): n stands for inosine
agugauggcugaugaggccguuaggccgaanugcuccu

SEQ ID NO: 13906 - RNA, 38 nt, Artificial Sequence
  Description of Artificial Sequence:  Enzymatic Nucleic Acid
  misc_feature (31)..(31): n stands for inosine
agagugaucugaugaggccguuaggccgaanagugcuc

SEQ ID NO: 13907 - RNA, 38 nt, Artificial Sequence
  Description of Artificial Sequence:  Enzymatic Nucleic Acid
  misc_feature (31)..(31): n stands for inosine
aagagugacugaugaggccguuaggccgaangagugcu

SEQ ID NO: 13908 - RNA, 38 nt, Artificial Sequence
  Description of Artificial Sequence:  Enzymatic Nucleic Acid
  misc_feature (31)..(31): n stands for inosine
auuaagagcugaugaggccguuaggccgaanauggagu

SEQ ID NO: 13909 - RNA, 38 nt, Artificial Sequence
  Description of Artificial Sequence:  Enzymatic Nucleic Acid
  misc_feature (31)..(31): n stands for inosine
agauuaagcugaugaggccguuaggccgaanugaugga

SEQ ID NO: 13910 - RNA, 38 nt, Artificial Sequence
  Description of Artificial Sequence:  Enzymatic Nucleic Acid
  misc_feature (31)..(31): n stands for inosine
uaagauuacugaugaggccguuaggccgaanagugaug

SEQ ID NO: 13911 - RNA, 38 nt, Artificial Sequence
  Description of Artificial Sequence:  Enzymatic Nucleic Acid
  misc_feature (31)..(31): n stands for inosine
ugaugguacugaugaggccguuaggccgaanauuaaga

SEQ ID NO: 13912 - RNA, 38 nt, Artificial Sequence
  Description of Artificial Sequence:  Enzymatic Nucleic Acid
  misc_feature (31)..(31): n stands for inosine
uucaugaucugaugaggccguuaggccgaanuaagauu

SEQ ID NO: 13913 - RNA, 38 nt, Artificial Sequence
  Description of Artificial Sequence:  Enzymatic Nucleic Acid
  misc_feature (31)..(31): n stands for inosine
auucaugacugaugaggccguuaggccgaanguaagau

SEQ ID NO: 13914 - RNA, 38 nt, Artificial Sequence
  Description of Artificial Sequence:  Enzymatic Nucleic Acid
  misc_feature (31)..(31): n stands for inosine
aacauucacugaugaggccguuaggccgaanaugguaa

SEQ ID NO: 13915 - RNA, 38 nt, Artificial Sequence
  Description of Artificial Sequence:  Enzymatic Nucleic Acid
  misc_feature (31)..(31): n stands for inosine
ucuugcagcugaugaggccguuaggccgaanaaacauu

SEQ ID NO: 13916 - RNA, 38 nt, Artificial Sequence
  Description of Artificial Sequence:  Enzymatic Nucleic Acid
  misc_feature (31)..(31): n stands for inosine
aucuugcacugaugaggccguuaggccgaangaaacau

SEQ ID NO: 13917 - RNA, 38 nt, Artificial Sequence
  Description of Artificial Sequence:  Enzymatic Nucleic Acid
  misc_feature (31)..(31): n stands for inosine
aaucuugccugaugaggccguuaggccgaanggaaaca

SEQ ID NO: 13918 - RNA, 38 nt, Artificial Sequence
  Description of Artificial Sequence:  Enzymatic Nucleic Acid
  misc_feature (31)..(31): n stands for inosine
cugaaucucugaugaggccguuaggccgaancagggaa

SEQ ID NO: 13919 - RNA, 38 nt, Artificial Sequence
  Description of Artificial Sequence:  Enzymatic Nucleic Acid
  misc_feature (31)..(31): n stands for inosine
uaggugcccugaugaggccguuaggccgaanaaucuug

SEQ ID NO: 13920 - RNA, 38 nt, Artificial Sequence
  Description of Artificial Sequence:  Enzymatic Nucleic Acid
  misc_feature (31)..(31): n stands for inosine
ggcauaggcugaugaggccguuaggccgaanccugaau

SEQ ID NO: 13921 - RNA, 38 nt, Artificial Sequence
  Description of Artificial Sequence:  Enzymatic Nucleic Acid
  misc_feature (31)..(31): n stands for inosine
caggcauacugaugaggccguuaggccgaanugccuga

SEQ ID NO: 13922 - RNA, 38 nt, Artificial Sequence
  Description of Artificial Sequence:  Enzymatic Nucleic Acid
  misc_feature (31)..(31): n stands for inosine
gcaggcaucugaugaggccguuaggccgaangugccug

SEQ ID NO: 13923 - RNA, 38 nt, Artificial Sequence
  Description of Artificial Sequence:  Enzymatic Nucleic Acid
  misc_feature (31)..(31): n stands for inosine
gcucugcacugaugaggccguuaggccgaancauaggu

SEQ ID NO: 13924 - RNA, 38 nt, Artificial Sequence
  Description of Artificial Sequence:  Enzymatic Nucleic Acid
  misc_feature (31)..(31): n stands for inosine
ggcucugccugaugaggccguuaggccgaangcauagg

SEQ ID NO: 13925 - RNA, 38 nt, Artificial Sequence
  Description of Artificial Sequence:  Enzymatic Nucleic Acid
  misc_feature (31)..(31): n stands for inosine
ccuggcuccugaugaggccguuaggccgaancaggcau

SEQ ID NO: 13926 - RNA, 38 nt, Artificial Sequence
  Description of Artificial Sequence:  Enzymatic Nucleic Acid
  misc_feature (31)..(31): n stands for inosine
acauuccucugaugaggccguuaggccgaancucugca

SEQ ID NO: 13927 - RNA, 38 nt, Artificial Sequence
  Description of Artificial Sequence:  Enzymatic Nucleic Acid
  misc_feature (31)..(31): n stands for inosine
uacauucccugaugaggccguuaggccgaangcucugc

SEQ ID NO: 13928 - RNA, 38 nt, Artificial Sequence
  Description of Artificial Sequence:  Enzymatic Nucleic Acid
  misc_feature (31)..(31): n stands for inosine
uuccccugcugaugaggccguuaggccgaanuauacau

SEQ ID NO: 13929 - RNA, 38 nt, Artificial Sequence
  Description of Artificial Sequence:  Enzymatic Nucleic Acid
  misc_feature (31)..(31): n stands for inosine
ucuucccccugaugaggccguuaggccgaanuguauac

SEQ ID NO: 13930 - RNA, 38 nt, Artificial Sequence
  Description of Artificial Sequence:  Enzymatic Nucleic Acid
  misc_feature (31)..(31): n stands for inosine
cuucuggacugaugaggccguuaggccgaanauuucuu

SEQ ID NO: 13931 - RNA, 38 nt, Artificial Sequence
  Description of Artificial Sequence:  Enzymatic Nucleic Acid
  misc_feature (31)..(31): n stands for inosine
ucuucuggcugaugaggccguuaggccgaangauuucu

SEQ ID NO: 13932 - RNA, 38 nt, Artificial Sequence
  Description of Artificial Sequence:  Enzymatic Nucleic Acid
  misc_feature (31)..(31): n stands for inosine
uuucuucucugaugaggccguuaggccgaanaggauuu

SEQ ID NO: 13933 - RNA, 38 nt, Artificial Sequence
  Description of Artificial Sequence:  Enzymatic Nucleic Acid
  misc_feature (31)..(31): n stands for inosine
cuuucuuccugaugaggccguuaggccgaangaggauu

SEQ ID NO: 13934 - RNA, 38 nt, Artificial Sequence
  Description of Artificial Sequence:  Enzymatic Nucleic Acid
  misc_feature (31)..(31): n stands for inosine
ucucugaucugaugaggccguuaggccgaanuaauuuc

SEQ ID NO: 13935 - RNA, 38 nt, Artificial Sequence
  Description of Artificial Sequence:  Enzymatic Nucleic Acid
  misc_feature (31)..(31): n stands for inosine
cugaucuccugaugaggccguuaggccgaanauuguaa

SEQ ID NO: 13936 - RNA, 38 nt, Artificial Sequence
  Description of Artificial Sequence:  Enzymatic Nucleic Acid
  misc_feature (31)..(31): n stands for inosine
gugcuucccugaugaggccguuaggccgaanaucucug

SEQ ID NO: 13937 - RNA, 38 nt, Artificial Sequence
  Description of Artificial Sequence:  Enzymatic Nucleic Acid
  misc_feature (31)..(31): n stands for inosine
agguauggcugaugaggccguuaggccgaancuuccug

SEQ ID NO: 13938 - RNA, 38 nt, Artificial Sequence
  Description of Artificial Sequence:  Enzymatic Nucleic Acid
  misc_feature (31)..(31): n stands for inosine
ggagguaucugaugaggccguuaggccgaanugcuucc

SEQ ID NO: 13939 - RNA, 38 nt, Artificial Sequence
  Description of Artificial Sequence:  Enzymatic Nucleic Acid
  misc_feature (31)..(31): n stands for inosine
aggagguacugaugaggccguuaggccgaangugcuuc

SEQ ID NO: 13940 - RNA, 38 nt, Artificial Sequence
  Description of Artificial Sequence:  Enzymatic Nucleic Acid
  misc_feature (31)..(31): n stands for inosine
ucgcaggacugaugaggccguuaggccgaanuauggug

SEQ ID NO: 13941 - RNA, 38 nt, Artificial Sequence
  Description of Artificial Sequence:  Enzymatic Nucleic Acid
  misc_feature (31)..(31): n stands for inosine
uucgcaggcugaugaggccguuaggccgaanguauggu

SEQ ID NO: 13942 - RNA, 38 nt, Artificial Sequence
  Description of Artificial Sequence:  Enzymatic Nucleic Acid
  misc_feature (31)..(31): n stands for inosine
guuucgcacugaugaggccguuaggccgaanagguaug

SEQ ID NO: 13943 - RNA, 38 nt, Artificial Sequence
  Description of Artificial Sequence:  Enzymatic Nucleic Acid
  misc_feature (31)..(31): n stands for inosine
gguuucgccugaugaggccguuaggccgaangagguau

SEQ ID NO: 13944 - RNA, 38 nt, Artificial Sequence
  Description of Artificial Sequence:  Enzymatic Nucleic Acid
  misc_feature (31)..(31): n stands for inosine
aucacugacugaugaggccguuaggccgaanuuucgca

SEQ ID NO: 13945 - RNA, 38 nt, Artificial Sequence
  Description of Artificial Sequence:  Enzymatic Nucleic Acid
  misc_feature (31)..(31): n stands for inosine
gaucacugcugaugaggccguuaggccgaanguuucgc

SEQ ID NO: 13946 - RNA, 38 nt, Artificial Sequence
  Description of Artificial Sequence:  Enzymatic Nucleic Acid
  misc_feature (31)..(31): n stands for inosine
gugaucaccugaugaggccguuaggccgaanagguuuc

SEQ ID NO: 13947 - RNA, 38 nt, Artificial Sequence
  Description of Artificial Sequence:  Enzymatic Nucleic Acid
  misc_feature (31)..(31): n stands for inosine
ccacugugcugaugaggccguuaggccgaanaucacug

SEQ ID NO: 13948 - RNA, 38 nt, Artificial Sequence
  Description of Artificial Sequence:  Enzymatic Nucleic Acid
  misc_feature (31)..(31): n stands for inosine
ggccacugcugaugaggccguuaggccgaanugaucac

SEQ ID NO: 13949 - RNA, 38 nt, Artificial Sequence
  Description of Artificial Sequence:  Enzymatic Nucleic Acid
  misc_feature (31)..(31): n stands for inosine
auggccaccugaugaggccguuaggccgaanugugauc

SEQ ID NO: 13950 - RNA, 38 nt, Artificial Sequence
  Description of Artificial Sequence:  Enzymatic Nucleic Acid
  misc_feature (31)..(31): n stands for inosine
cugcugaucugaugaggccguuaggccgaanccacugu

SEQ ID NO: 13951 - RNA, 38 nt, Artificial Sequence
  Description of Artificial Sequence:  Enzymatic Nucleic Acid
  misc_feature (31)..(31): n stands for inosine
acugcugacugaugaggccguuaggccgaangccacug

SEQ ID NO: 13952 - RNA, 38 nt, Artificial Sequence
  Description of Artificial Sequence:  Enzymatic Nucleic Acid
  misc_feature (31)..(31): n stands for inosine
ggaacugccugaugaggccguuaggccgaanauggcca

SEQ ID NO: 13953 - RNA, 38 nt, Artificial Sequence
  Description of Artificial Sequence:  Enzymatic Nucleic Acid
  misc_feature (31)..(31): n stands for inosine
gguggaaccugaugaggccguuaggccgaancugaugg

SEQ ID NO: 13954 - RNA, 38 nt, Artificial Sequence
  Description of Artificial Sequence:  Enzymatic Nucleic Acid
  misc_feature (31)..(31): n stands for inosine
aaaguggucugaugaggccguuaggccgaanaacugcu

SEQ ID NO: 13955 - RNA, 38 nt, Artificial Sequence
  Description of Artificial Sequence:  Enzymatic Nucleic Acid
  misc_feature (31)..(31): n stands for inosine
uaaaguggcugaugaggccguuaggccgaangaacugc

SEQ ID NO: 13956 - RNA, 38 nt, Artificial Sequence
  Description of Artificial Sequence:  Enzymatic Nucleic Acid
  misc_feature (31)..(31): n stands for inosine
ucuaaagucugaugaggccguuaggccgaanuggaacu

SEQ ID NO: 13957 - RNA, 38 nt, Artificial Sequence
  Description of Artificial Sequence:  Enzymatic Nucleic Acid
  misc_feature (31)..(31): n stands for inosine
gucuaaagcugaugaggccguuaggccgaanguggaac

SEQ ID NO: 13958 - RNA, 38 nt, Artificial Sequence
  Description of Artificial Sequence:  Enzymatic Nucleic Acid
  misc_feature (31)..(31): n stands for inosine
cagucuaacugaugaggccguuaggccgaanuggugga

SEQ ID NO: 13959 - RNA, 38 nt, Artificial Sequence
  Description of Artificial Sequence:  Enzymatic Nucleic Acid
  misc_feature (31)..(31): n stands for inosine
agcaugaccugaugaggccguuaggccgaanucuaaag

SEQ ID NO: 13960 - RNA, 38 nt, Artificial Sequence
  Description of Artificial Sequence:  Enzymatic Nucleic Acid
  misc_feature (31)..(31): n stands for inosine
cauuagcacugaugaggccguuaggccgaanacagucu

SEQ ID NO: 13961 - RNA, 38 nt, Artificial Sequence
  Description of Artificial Sequence:  Enzymatic Nucleic Acid
  misc_feature (31)..(31): n stands for inosine
acaccauucugaugaggccguuaggccgaancaugaca

SEQ ID NO: 13962 - RNA, 38 nt, Artificial Sequence
  Description of Artificial Sequence:  Enzymatic Nucleic Acid
  misc_feature (31)..(31): n stands for inosine
aggcucggcugaugaggccguuaggccgaanacaccau

SEQ ID NO: 13963 - RNA, 38 nt, Artificial Sequence
  Description of Artificial Sequence:  Enzymatic Nucleic Acid
  misc_feature (31)..(31): n stands for inosine
gaggcucgcugaugaggccguuaggccgaangacacca

SEQ ID NO: 13964 - RNA, 38 nt, Artificial Sequence
  Description of Artificial Sequence:  Enzymatic Nucleic Acid
  misc_feature (31)..(31): n stands for inosine
ugaggcuccugaugaggccguuaggccgaanggacacc

SEQ ID NO: 13965 - RNA, 38 nt, Artificial Sequence
  Description of Artificial Sequence:  Enzymatic Nucleic Acid
  misc_feature (31)..(31): n stands for inosine
ugaucugacugaugaggccguuaggccgaancucgggg

SEQ ID NO: 13966 - RNA, 38 nt, Artificial Sequence
  Description of Artificial Sequence:  Enzymatic Nucleic Acid
  misc_feature (31)..(31): n stands for inosine
gugaucugcugaugaggccguuaggccgaangcucggg

SEQ ID NO: 13967 - RNA, 38 nt, Artificial Sequence
  Description of Artificial Sequence:  Enzymatic Nucleic Acid
  misc_feature (31)..(31): n stands for inosine
aagugauccugaugaggccguuaggccgaanaggcucg

SEQ ID NO: 13968 - RNA, 38 nt, Artificial Sequence
  Description of Artificial Sequence:  Enzymatic Nucleic Acid
  misc_feature (31)..(31): n stands for inosine
aaaccaagcugaugaggccguuaggccgaanaucugag

SEQ ID NO: 13969 - RNA, 38 nt, Artificial Sequence
  Description of Artificial Sequence:  Enzymatic Nucleic Acid
  misc_feature (31)..(31): n stands for inosine
uuaaaccacugaugaggccguuaggccgaanugaucug

SEQ ID NO: 13970 - RNA, 38 nt, Artificial Sequence
  Description of Artificial Sequence:  Enzymatic Nucleic Acid
  misc_feature (31)..(31): n stands for inosine
uuuguggucugaugaggccguuaggccgaanuuuuuaa

SEQ ID NO: 13971 - RNA, 38 nt, Artificial Sequence
  Description of Artificial Sequence:  Enzymatic Nucleic Acid
  misc_feature (31)..(31): n stands for inosine
uauuuugucugaugaggccguuaggccgaanuuguuuu

SEQ ID NO: 13972 - RNA, 38 nt, Artificial Sequence
  Description of Artificial Sequence:  Enzymatic Nucleic Acid
  misc_feature (31)..(31): n stands for inosine
guauuuugcugaugaggccguuaggccgaanguuguuu

SEQ ID NO: 13973 - RNA, 38 nt, Artificial Sequence
  Description of Artificial Sequence:  Enzymatic Nucleic Acid
  misc_feature (31)..(31): n stands for inosine
uuguauuucugaugaggccguuaggccgaanugguugu

SEQ ID NO: 13974 - RNA, 38 nt, Artificial Sequence
  Description of Artificial Sequence:  Enzymatic Nucleic Acid
  misc_feature (31)..(31): n stands for inosine
gcucuugucugaugaggccguuaggccgaanuauuuug

SEQ ID NO: 13975 - RNA, 38 nt, Artificial Sequence
  Description of Artificial Sequence:  Enzymatic Nucleic Acid
  misc_feature (31)..(31): n stands for inosine
caggcucucugaugaggccguuaggccgaanuuguauu

SEQ ID NO: 13976 - RNA, 38 nt, Artificial Sequence
  Description of Artificial Sequence:  Enzymatic Nucleic Acid
  misc_feature (31)..(31): n stands for inosine
uaauuccacugaugaggccguuaggccgaancucuugu

SEQ ID NO: 13977 - RNA, 38 nt, Artificial Sequence
  Description of Artificial Sequence:  Enzymatic Nucleic Acid
  misc_feature (31)..(31): n stands for inosine
auaauucccugaugaggccguuaggccgaangcucuug

SEQ ID NO: 13978 - RNA, 38 nt, Artificial Sequence
  Description of Artificial Sequence:  Enzymatic Nucleic Acid
  misc_feature (31)..(31): n stands for inosine
ugcuuccucugaugaggccguuaggccgaanuccuaaa

SEQ ID NO: 13979 - RNA, 38 nt, Artificial Sequence
  Description of Artificial Sequence:  Enzymatic Nucleic Acid
  misc_feature (31)..(31): n stands for inosine
cugcuucccugaugaggccguuaggccgaanguccuaa

SEQ ID NO: 13980 - RNA, 38 nt, Artificial Sequence
  Description of Artificial Sequence:  Enzymatic Nucleic Acid
  misc_feature (31)..(31): n stands for inosine
cagcgugccugaugaggccguuaggccgaancuuccug

SEQ ID NO: 13981 - RNA, 38 nt, Artificial Sequence
  Description of Artificial Sequence:  Enzymatic Nucleic Acid
  misc_feature (31)..(31): n stands for inosine
aaacagcgcugaugaggccguuaggccgaancugcuuc

SEQ ID NO: 13982 - RNA, 38 nt, Artificial Sequence
  Description of Artificial Sequence:  Enzymatic Nucleic Acid
  misc_feature (31)..(31): n stands for inosine
caauaaaccugaugaggccguuaggccgaancgugcug

SEQ ID NO: 13983 - RNA, 38 nt, Artificial Sequence
  Description of Artificial Sequence:  Enzymatic Nucleic Acid
  misc_feature (31)..(31): n stands for inosine
cucuucugcugaugaggccguuaggccgaanacucuuu

SEQ ID NO: 13984 - RNA, 38 nt, Artificial Sequence
  Description of Artificial Sequence:  Enzymatic Nucleic Acid
  misc_feature (31)..(31): n stands for inosine
uccucuuccugaugaggccguuaggccgaanugacucu

SEQ ID NO: 13985 - RNA, 38 nt, Artificial Sequence
  Description of Artificial Sequence:  Enzymatic Nucleic Acid
  misc_feature (31)..(31): n stands for inosine
gcagugaucugaugaggccguuaggccgaanacaccuu

SEQ ID NO: 13986 - RNA, 38 nt, Artificial Sequence
  Description of Artificial Sequence:  Enzymatic Nucleic Acid
  misc_feature (31)..(31): n stands for inosine
cuuugcagcugaugaggccguuaggccgaanauagaca

SEQ ID NO: 13987 - RNA, 38 nt, Artificial Sequence
  Description of Artificial Sequence:  Enzymatic Nucleic Acid
  misc_feature (31)..(31): n stands for inosine
ggcuuugccugaugaggccguuaggccgaanugauaga

SEQ ID NO: 13988 - RNA, 38 nt, Artificial Sequence
  Description of Artificial Sequence:  Enzymatic Nucleic Acid
  misc_feature (31)..(31): n stands for inosine
gguggcuucugaugaggccguuaggccgaancagugau

SEQ ID NO: 13989 - RNA, 38 nt, Artificial Sequence
  Description of Artificial Sequence:  Enzymatic Nucleic Acid
  misc_feature (31)..(31): n stands for inosine
ugguuggucugaugaggccguuaggccgaancuuugca

SEQ ID NO: 13990 - RNA, 38 nt, Artificial Sequence
  Description of Artificial Sequence:  Enzymatic Nucleic Acid
  misc_feature (31)..(31): n stands for inosine
cugguuggcugaugaggccguuaggccgaangcuuugc

SEQ ID NO: 13991 - RNA, 38 nt, Artificial Sequence
  Description of Artificial Sequence:  Enzymatic Nucleic Acid
  misc_feature (31)..(31): n stands for inosine
uucugguucugaugaggccguuaggccgaanuggcuuu

SEQ ID NO: 13992 - RNA, 38 nt, Artificial Sequence
  Description of Artificial Sequence:  Enzymatic Nucleic Acid
  misc_feature (31)..(31): n stands for inosine
cuucuggucugaugaggccguuaggccgaanguggcuu

SEQ ID NO: 13993 - RNA, 38 nt, Artificial Sequence
  Description of Artificial Sequence:  Enzymatic Nucleic Acid
  misc_feature (31)..(31): n stands for inosine
gcccuucucugaugaggccguuaggccgaanuuggugg

SEQ ID NO: 13994 - RNA, 38 nt, Artificial Sequence
  Description of Artificial Sequence:  Enzymatic Nucleic Acid
  misc_feature (31)..(31): n stands for inosine
agcccuuccugaugaggccguuaggccgaanguuggug

SEQ ID NO: 13995 - RNA, 38 nt, Artificial Sequence
  Description of Artificial Sequence:  Enzymatic Nucleic Acid
  misc_feature (31)..(31): n stands for inosine
uuccacagcugaugaggccguuaggccgaancccuucu

SEQ ID NO: 13996 - RNA, 38 nt, Artificial Sequence
  Description of Artificial Sequence:  Enzymatic Nucleic Acid
  misc_feature (31)..(31): n stands for inosine
cuuuccaccugaugaggccguuaggccgaanagcccuu

SEQ ID NO: 13997 - RNA, 38 nt, Artificial Sequence
  Description of Artificial Sequence:  Enzymatic Nucleic Acid
  misc_feature (31)..(31): n stands for inosine
agguaugccugaugaggccguuaggccgaanaacuuuc

SEQ ID NO: 13998 - RNA, 38 nt, Artificial Sequence
  Description of Artificial Sequence:  Enzymatic Nucleic Acid
  misc_feature (31)..(31): n stands for inosine
gugagguacugaugaggccguuaggccgaancugaacu

SEQ ID NO: 13999 - RNA, 38 nt, Artificial Sequence
  Description of Artificial Sequence:  Enzymatic Nucleic Acid
  misc_feature (31)..(31): n stands for inosine
aacagugacugaugaggccguuaggccgaanuaugcug

SEQ ID NO: 14000 - RNA, 38 nt, Artificial Sequence
  Description of Artificial Sequence:  Enzymatic Nucleic Acid
  misc_feature (31)..(31): n stands for inosine
gaacagugcugaugaggccguuaggccgaanguaugcu

SEQ ID NO: 14001 - RNA, 38 nt, Artificial Sequence
  Description of Artificial Sequence:  Enzymatic Nucleic Acid
  misc_feature (31)..(31): n stands for inosine
uugaacagcugaugaggccguuaggccgaanagguaug

SEQ ID NO: 14002 - RNA, 38 nt, Artificial Sequence
  Description of Artificial Sequence:  Enzymatic Nucleic Acid
  misc_feature (31)..(31): n stands for inosine
ccuugaaccugaugaggccguuaggccgaanugaggua

SEQ ID NO: 14003 - RNA, 38 nt, Artificial Sequence
  Description of Artificial Sequence:  Enzymatic Nucleic Acid
  misc_feature (31)..(31): n stands for inosine
agguuccucugaugaggccguuaggccgaanaacagug

SEQ ID NO: 14004 - RNA, 38 nt, Artificial Sequence
  Description of Artificial Sequence:  Enzymatic Nucleic Acid
  misc_feature (31)..(31): n stands for inosine
uuguccgacugaugaggccguuaggccgaanuuccuug

SEQ ID NO: 14005 - RNA, 38 nt, Artificial Sequence
  Description of Artificial Sequence:  Enzymatic Nucleic Acid
  misc_feature (31)..(31): n stands for inosine
cuuguccgcugaugaggccguuaggccgaanguuccuu

SEQ ID NO: 14006 - RNA, 38 nt, Artificial Sequence
  Description of Artificial Sequence:  Enzymatic Nucleic Acid
  misc_feature (31)..(31): n stands for inosine
auuagacucugaugaggccguuaggccgaanuccgagg

SEQ ID NO: 14007 - RNA, 38 nt, Artificial Sequence
  Description of Artificial Sequence:  Enzymatic Nucleic Acid
  misc_feature (31)..(31): n stands for inosine
uccagauucugaugaggccguuaggccgaanacuuguc

SEQ ID NO: 14008 - RNA, 38 nt, Artificial Sequence
  Description of Artificial Sequence:  Enzymatic Nucleic Acid
  misc_feature (31)..(31): n stands for inosine
ucagcucccugaugaggccguuaggccgaanauuagac

SEQ ID NO: 14009 - RNA, 38 nt, Artificial Sequence
  Description of Artificial Sequence:  Enzymatic Nucleic Acid
  misc_feature (31)..(31): n stands for inosine
gagugauccugaugaggccguuaggccgaancuccaga

SEQ ID NO: 14010 - RNA, 38 nt, Artificial Sequence
  Description of Artificial Sequence:  Enzymatic Nucleic Acid
  misc_feature (31)..(31): n stands for inosine
uguuagagcugaugaggccguuaggccgaanaucagcu

SEQ ID NO: 14011 - RNA, 38 nt, Artificial Sequence
  Description of Artificial Sequence:  Enzymatic Nucleic Acid
  misc_feature (31)..(31): n stands for inosine
cauguuagcugaugaggccguuaggccgaanugaucag

SEQ ID NO: 14012 - RNA, 38 nt, Artificial Sequence
  Description of Artificial Sequence:  Enzymatic Nucleic Acid
  misc_feature (31)..(31): n stands for inosine
ugcauguucugaugaggccguuaggccgaanagugauc

SEQ ID NO: 14013 - RNA, 38 nt, Artificial Sequence
  Description of Artificial Sequence:  Enzymatic Nucleic Acid
  misc_feature (31)..(31): n stands for inosine
caggugcacugaugaggccguuaggccgaanuuagagu

SEQ ID NO: 14014 - RNA, 38 nt, Artificial Sequence
  Description of Artificial Sequence:  Enzymatic Nucleic Acid
  misc_feature (31)..(31): n stands for inosine
cacacaggcugaugaggccguuaggccgaancauguua

SEQ ID NO: 14015 - RNA, 38 nt, Artificial Sequence
  Description of Artificial Sequence:  Enzymatic Nucleic Acid
  misc_feature (31)..(31): n stands for inosine
gccacacacugaugaggccguuaggccgaanugcaugu

SEQ ID NO: 14016 - RNA, 38 nt, Artificial Sequence
  Description of Artificial Sequence:  Enzymatic Nucleic Acid
  misc_feature (31)..(31): n stands for inosine
agccacaccugaugaggccguuaggccgaangugcaug

SEQ ID NO: 14017 - RNA, 38 nt, Artificial Sequence
  Description of Artificial Sequence:  Enzymatic Nucleic Acid
  misc_feature (31)..(31): n stands for inosine
agagucgccugaugaggccguuaggccgaanccacaca

SEQ ID NO: 14018 - RNA, 38 nt, Artificial Sequence
  Description of Artificial Sequence:  Enzymatic Nucleic Acid
  misc_feature (31)..(31): n stands for inosine
cagaagagcugaugaggccguuaggccgaanucgcagc

SEQ ID NO: 14019 - RNA, 38 nt, Artificial Sequence
  Description of Artificial Sequence:  Enzymatic Nucleic Acid
  misc_feature (31)..(31): n stands for inosine
gccagaagcugaugaggccguuaggccgaanagucgca

SEQ ID NO: 14020 - RNA, 38 nt, Artificial Sequence
  Description of Artificial Sequence:  Enzymatic Nucleic Acid
  misc_feature (31)..(31): n stands for inosine
gagccagacugaugaggccguuaggccgaanagagucg

SEQ ID NO: 14021 - RNA, 38 nt, Artificial Sequence
  Description of Artificial Sequence:  Enzymatic Nucleic Acid
  misc_feature (31)..(31): n stands for inosine
uaggagcccugaugaggccguuaggccgaanaagagag

SEQ ID NO: 14022 - RNA, 38 nt, Artificial Sequence
  Description of Artificial Sequence:  Enzymatic Nucleic Acid
  misc_feature (31)..(31): n stands for inosine
uuaauaggcugaugaggccguuaggccgaanccagaag

SEQ ID NO: 14023 - RNA, 38 nt, Artificial Sequence
  Description of Artificial Sequence:  Enzymatic Nucleic Acid
  misc_feature (31)..(31): n stands for inosine
gguuaauacugaugaggccguuaggccgaanagccaga

SEQ ID NO: 14024 - RNA, 38 nt, Artificial Sequence
  Description of Artificial Sequence:  Enzymatic Nucleic Acid
  misc_feature (31)..(31): n stands for inosine
ggguuaaucugaugaggccguuaggccgaangagccag

SEQ ID NO: 14025 - RNA, 38 nt, Artificial Sequence
  Description of Artificial Sequence:  Enzymatic Nucleic Acid
  misc_feature (31)..(31): n stands for inosine
auaaggagcugaugaggccguuaggccgaanuuaauag

SEQ ID NO: 14026 - RNA, 38 nt, Artificial Sequence
  Description of Artificial Sequence:  Enzymatic Nucleic Acid
  misc_feature (31)..(31): n stands for inosine
gauaaggacugaugaggccguuaggccgaanguuaaua

SEQ ID NO: 14027 - RNA, 38 nt, Artificial Sequence
  Description of Artificial Sequence:  Enzymatic Nucleic Acid
  misc_feature (31)..(31): n stands for inosine
ggauaaggcugaugaggccguuaggccgaangguuaau

SEQ ID NO: 14028 - RNA, 38 nt, Artificial Sequence
  Description of Artificial Sequence:  Enzymatic Nucleic Acid
  misc_feature (31)..(31): n stands for inosine
ucggauaacugaugaggccguuaggccgaanaggguua

SEQ ID NO: 14029 - RNA, 38 nt, Artificial Sequence
  Description of Artificial Sequence:  Enzymatic Nucleic Acid
  misc_feature (31)..(31): n stands for inosine
uucggauacugaugaggccguuaggccgaangaggguu

SEQ ID NO: 14030 - RNA, 38 nt, Artificial Sequence
  Description of Artificial Sequence:  Enzymatic Nucleic Acid
  misc_feature (31)..(31): n stands for inosine
cauuuuuccugaugaggccguuaggccgaanauaagga

SEQ ID NO: 14031 - RNA, 38 nt, Artificial Sequence
  Description of Artificial Sequence:  Enzymatic Nucleic Acid
  misc_feature (31)..(31): n stands for inosine
ucagaagacugaugaggccguuaggccgaanaccuuuu

SEQ ID NO: 14032 - RNA, 38 nt, Artificial Sequence
  Description of Artificial Sequence:  Enzymatic Nucleic Acid
  misc_feature (31)..(31): n stands for inosine
auuucagacugaugaggccguuaggccgaanaagaccu

SEQ ID NO: 14033 - RNA, 38 nt, Artificial Sequence
  Description of Artificial Sequence:  Enzymatic Nucleic Acid
  misc_feature (31)..(31): n stands for inosine
uuuauuuccugaugaggccguuaggccgaanaagaaga

SEQ ID NO: 14034 - RNA, 38 nt, Artificial Sequence
  Description of Artificial Sequence:  Enzymatic Nucleic Acid
  misc_feature (31)..(31): n stands for inosine
agguaguccugaugaggccguuaggccgaanucuuuau

SEQ ID NO: 14035 - RNA, 38 nt, Artificial Sequence
  Description of Artificial Sequence:  Enzymatic Nucleic Acid
  misc_feature (31)..(31): n stands for inosine
ugauaggucugaugaggccguuaggccgaanucagucu

SEQ ID NO: 14036 - RNA, 38 nt, Artificial Sequence
  Description of Artificial Sequence:  Enzymatic Nucleic Acid
  misc_feature (31)..(31): n stands for inosine
aauugauacugaugaggccguuaggccgaanuagucag

SEQ ID NO: 14037 - RNA, 38 nt, Artificial Sequence
  Description of Artificial Sequence:  Enzymatic Nucleic Acid
  misc_feature (31)..(31): n stands for inosine
uaauugaucugaugaggccguuaggccgaanguaguca

SEQ ID NO: 14038 - RNA, 38 nt, Artificial Sequence
  Description of Artificial Sequence:  Enzymatic Nucleic Acid
  misc_feature (31)..(31): n stands for inosine
auuauaaucugaugaggccguuaggccgaanauaggua

SEQ ID NO: 14039 - RNA, 38 nt, Artificial Sequence
  Description of Artificial Sequence:  Enzymatic Nucleic Acid
  misc_feature (31)..(31): n stands for inosine
uucaucugcugaugaggccguuaggccgaanuccauua

SEQ ID NO: 14040 - RNA, 38 nt, Artificial Sequence
  Description of Artificial Sequence:  Enzymatic Nucleic Acid
  misc_feature (31)..(31): n stands for inosine
cuucaucucugaugaggccguuaggccgaanguccauu

SEQ ID NO: 14041 - RNA, 38 nt, Artificial Sequence
  Description of Artificial Sequence:  Enzymatic Nucleic Acid
  misc_feature (31)..(31): n stands for inosine
acuucauccugaugaggccguuaggccgaangguccau

SEQ ID NO: 14042 - RNA, 38 nt, Artificial Sequence
  Description of Artificial Sequence:  Enzymatic Nucleic Acid
  misc_feature (31)..(31): n stands for inosine
cauccaaacugaugaggccguuaggccgaanaacuuca

SEQ ID NO: 14043 - RNA, 38 nt, Artificial Sequence
  Description of Artificial Sequence:  Enzymatic Nucleic Acid
  misc_feature (31)..(31): n stands for inosine
ucauccaacugaugaggccguuaggccgaangaacuuc

SEQ ID NO: 14044 - RNA, 38 nt, Artificial Sequence
  Description of Artificial Sequence:  Enzymatic Nucleic Acid
  misc_feature (31)..(31): n stands for inosine
gcucacaccugaugaggccguuaggccgaancucaucc

SEQ ID NO: 14045 - RNA, 38 nt, Artificial Sequence
  Description of Artificial Sequence:  Enzymatic Nucleic Acid
  misc_feature (31)..(31): n stands for inosine
cauaagggcugaugaggccguuaggccgaanccgcuca

SEQ ID NO: 14046 - RNA, 38 nt, Artificial Sequence
  Description of Artificial Sequence:  Enzymatic Nucleic Acid
  misc_feature (31)..(31): n stands for inosine
aucauaagcugaugaggccguuaggccgaanagccgcu

SEQ ID NO: 14047 - RNA, 38 nt, Artificial Sequence
  Description of Artificial Sequence:  Enzymatic Nucleic Acid
  misc_feature (31)..(31): n stands for inosine
caucauaacugaugaggccguuaggccgaangagccgc

SEQ ID NO: 14048 - RNA, 38 nt, Artificial Sequence
  Description of Artificial Sequence:  Enzymatic Nucleic Acid
  misc_feature (31)..(31): n stands for inosine
gcaucauacugaugaggccguuaggccgaanggagccg

SEQ ID NO: 14049 - RNA, 38 nt, Artificial Sequence
  Description of Artificial Sequence:  Enzymatic Nucleic Acid
  misc_feature (31)..(31): n stands for inosine
cacuugcucugaugaggccguuaggccgaancaucaua

SEQ ID NO: 14050 - RNA, 38 nt, Artificial Sequence
  Description of Artificial Sequence:  Enzymatic Nucleic Acid
  misc_feature (31)..(31): n stands for inosine
ccacuugccugaugaggccguuaggccgaangcaucau

SEQ ID NO: 14051 - RNA, 38 nt, Artificial Sequence
  Description of Artificial Sequence:  Enzymatic Nucleic Acid
  misc_feature (31)..(31): n stands for inosine
cucccacucugaugaggccguuaggccgaancuggcau

SEQ ID NO: 14052 - RNA, 38 nt, Artificial Sequence
  Description of Artificial Sequence:  Enzymatic Nucleic Acid
  misc_feature (31)..(31): n stands for inosine
cucucccgcugaugaggccguuaggccgaancaaacuc

SEQ ID NO: 14053 - RNA, 38 nt, Artificial Sequence
  Description of Artificial Sequence:  Enzymatic Nucleic Acid
  misc_feature (31)..(31): n stands for inosine
ucucuccccugaugaggccguuaggccgaangcaaacu

SEQ ID NO: 14054 - RNA, 38 nt, Artificial Sequence
  Description of Artificial Sequence:  Enzymatic Nucleic Acid
  misc_feature (31)..(31): n stands for inosine
ccaguuuacugaugaggccguuaggccgaanucucucc

SEQ ID NO: 14055 - RNA, 38 nt, Artificial Sequence
  Description of Artificial Sequence:  Enzymatic Nucleic Acid
  misc_feature (31)..(31): n stands for inosine
auuugccccugaugaggccguuaggccgaanuuuaagu

SEQ ID NO: 14056 - RNA, 38 nt, Artificial Sequence
  Description of Artificial Sequence:  Enzymatic Nucleic Acid
  misc_feature (31)..(31): n stands for inosine
aagugauucugaugaggccguuaggccgaancccaguu

SEQ ID NO: 14057 - RNA, 38 nt, Artificial Sequence
  Description of Artificial Sequence:  Enzymatic Nucleic Acid
  misc_feature (31)..(31): n stands for inosine
cuuccaagcugaugaggccguuaggccgaanauuugcc

SEQ ID NO: 14058 - RNA, 38 nt, Artificial Sequence
  Description of Artificial Sequence:  Enzymatic Nucleic Acid
  misc_feature (31)..(31): n stands for inosine
cucuuccacugaugaggccguuaggccgaanugauuug

SEQ ID NO: 14059 - RNA, 38 nt, Artificial Sequence
  Description of Artificial Sequence:  Enzymatic Nucleic Acid
  misc_feature (31)..(31): n stands for inosine
uuuccaaacugaugaggccguuaggccgaanccccucu

SEQ ID NO: 14060 - RNA, 38 nt, Artificial Sequence
  Description of Artificial Sequence:  Enzymatic Nucleic Acid
  misc_feature (31)..(31): n stands for inosine
cugaugcucugaugaggccguuaggccgaanaaccacu

SEQ ID NO: 14061 - RNA, 38 nt, Artificial Sequence
  Description of Artificial Sequence:  Enzymatic Nucleic Acid
  misc_feature (31)..(31): n stands for inosine
aaugcugacugaugaggccguuaggccgaancuugaac

SEQ ID NO: 14062 - RNA, 38 nt, Artificial Sequence
  Description of Artificial Sequence:  Enzymatic Nucleic Acid
  misc_feature (31)..(31): n stands for inosine
ccaaaugccugaugaggccguuaggccgaanaugcuug

SEQ ID NO: 14063 - RNA, 38 nt, Artificial Sequence
  Description of Artificial Sequence:  Enzymatic Nucleic Acid
  misc_feature (31)..(31): n stands for inosine
augccaaacugaugaggccguuaggccgaancugaugc

SEQ ID NO: 14064 - RNA, 38 nt, Artificial Sequence
  Description of Artificial Sequence:  Enzymatic Nucleic Acid
  misc_feature (31)..(31): n stands for inosine
uuucuuaacugaugaggccguuaggccgaanccaaaug

SEQ ID NO: 14065 - RNA, 38 nt, Artificial Sequence
  Description of Artificial Sequence:  Enzymatic Nucleic Acid
  misc_feature (31)..(31): n stands for inosine
cacguaggcugaugaggccguuaggccgaanauuucuu

SEQ ID NO: 14066 - RNA, 38 nt, Artificial Sequence
  Description of Artificial Sequence:  Enzymatic Nucleic Acid
  misc_feature (31)..(31): n stands for inosine
ggcacguacugaugaggccguuaggccgaanugauuuc

SEQ ID NO: 14067 - RNA, 38 nt, Artificial Sequence
  Description of Artificial Sequence:  Enzymatic Nucleic Acid
  misc_feature (31)..(31): n stands for inosine
cggcacgucugaugaggccguuaggccgaangugauuu

SEQ ID NO: 14068 - RNA, 38 nt, Artificial Sequence
  Description of Artificial Sequence:  Enzymatic Nucleic Acid
  misc_feature (31)..(31): n stands for inosine
cacagucccugaugaggccguuaggccgaancacguag

SEQ ID NO: 14069 - RNA, 38 nt, Artificial Sequence
  Description of Artificial Sequence:  Enzymatic Nucleic Acid
  misc_feature (31)..(31): n stands for inosine
acagccaccugaugaggccguuaggccgaanuccggca

SEQ ID NO: 14070 - RNA, 38 nt, Artificial Sequence
  Description of Artificial Sequence:  Enzymatic Nucleic Acid
  misc_feature (31)..(31): n stands for inosine
auuuucaccugaugaggccguuaggccgaanccacagu

SEQ ID NO: 14071 - RNA, 38 nt, Artificial Sequence
  Description of Artificial Sequence:  Enzymatic Nucleic Acid
  misc_feature (31)..(31): n stands for inosine
ccucuuuccugaugaggccguuaggccgaancauuuuc

SEQ ID NO: 14072 - RNA, 38 nt, Artificial Sequence
  Description of Artificial Sequence:  Enzymatic Nucleic Acid
  misc_feature (31)..(31): n stands for inosine
cuggccgucugaugaggccguuaggccgaancccccuc

SEQ ID NO: 14073 - RNA, 38 nt, Artificial Sequence
  Description of Artificial Sequence:  Enzymatic Nucleic Acid
  misc_feature (31)..(31): n stands for inosine
gcuggccgcugaugaggccguuaggccgaangcccccu

SEQ ID NO: 14074 - RNA, 38 nt, Artificial Sequence
  Description of Artificial Sequence:  Enzymatic Nucleic Acid
  misc_feature (31)..(31): n stands for inosine
uacucgcucugaugaggccguuaggccgaanccguggc

SEQ ID NO: 14075 - RNA, 38 nt, Artificial Sequence
  Description of Artificial Sequence:  Enzymatic Nucleic Acid
  misc_feature (31)..(31): n stands for inosine
guacucgccugaugaggccguuaggccgaangccgugg

SEQ ID NO: 14076 - RNA, 38 nt, Artificial Sequence
  Description of Artificial Sequence:  Enzymatic Nucleic Acid
  misc_feature (31)..(31): n stands for inosine
cagagcuucugaugaggccguuaggccgaanuacucgc

SEQ ID NO: 14077 - RNA, 38 nt, Artificial Sequence
  Description of Artificial Sequence:  Enzymatic Nucleic Acid
  misc_feature (31)..(31): n stands for inosine
gucaucagcugaugaggccguuaggccgaancuuugua

SEQ ID NO: 14078 - RNA, 38 nt, Artificial Sequence
  Description of Artificial Sequence:  Enzymatic Nucleic Acid
  misc_feature (31)..(31): n stands for inosine
cagucauccugaugaggccguuaggccgaanagcuuug

SEQ ID NO: 14079 - RNA, 38 nt, Artificial Sequence
  Description of Artificial Sequence:  Enzymatic Nucleic Acid
  misc_feature (31)..(31): n stands for inosine
uuuagcuccugaugaggccguuaggccgaanucaucag

SEQ ID NO: 14080 - RNA, 38 nt, Artificial Sequence
  Description of Artificial Sequence:  Enzymatic Nucleic Acid
  misc_feature (31)..(31): n stands for inosine
agauuuuucugaugaggccguuaggccgaancucaguc

SEQ ID NO: 14081 - RNA, 38 nt, Artificial Sequence
  Description of Artificial Sequence:  Enzymatic Nucleic Acid
  misc_feature (31)..(31): n stands for inosine
gugggucacugaugaggccguuaggccgaanauuuuua

SEQ ID NO: 14082 - RNA, 38 nt, Artificial Sequence
  Description of Artificial Sequence:  Enzymatic Nucleic Acid
  misc_feature (31)..(31): n stands for inosine
ccaaugugcugaugaggccguuaggccgaanucaagau

SEQ ID NO: 14083 - RNA, 38 nt, Artificial Sequence
  Description of Artificial Sequence:  Enzymatic Nucleic Acid
  misc_feature (31)..(31): n stands for inosine
gccaaugucugaugaggccguuaggccgaangucaaga

SEQ ID NO: 14084 - RNA, 38 nt, Artificial Sequence
  Description of Artificial Sequence:  Enzymatic Nucleic Acid
  misc_feature (31)..(31): n stands for inosine
ggccaaugcugaugaggccguuaggccgaanggucaag

SEQ ID NO: 14085 - RNA, 38 nt, Artificial Sequence
  Description of Artificial Sequence:  Enzymatic Nucleic Acid
  misc_feature (31)..(31): n stands for inosine
guggccaacugaugaggccguuaggccgaanuggguca

SEQ ID NO: 14086 - RNA, 38 nt, Artificial Sequence
  Description of Artificial Sequence:  Enzymatic Nucleic Acid
  misc_feature (31)..(31): n stands for inosine
cagauggucugaugaggccguuaggccgaanccaaugu

SEQ ID NO: 14087 - RNA, 38 nt, Artificial Sequence
  Description of Artificial Sequence:  Enzymatic Nucleic Acid
  misc_feature (31)..(31): n stands for inosine
ucagauggcugaugaggccguuaggccgaangccaaug

SEQ ID NO: 14088 - RNA, 38 nt, Artificial Sequence
  Description of Artificial Sequence:  Enzymatic Nucleic Acid
  misc_feature (31)..(31): n stands for inosine
guucagaucugaugaggccguuaggccgaanuggccaa

SEQ ID NO: 14089 - RNA, 38 nt, Artificial Sequence
  Description of Artificial Sequence:  Enzymatic Nucleic Acid
  misc_feature (31)..(31): n stands for inosine
cguucagacugaugaggccguuaggccgaanguggcca

SEQ ID NO: 14090 - RNA, 38 nt, Artificial Sequence
  Description of Artificial Sequence:  Enzymatic Nucleic Acid
  misc_feature (31)..(31): n stands for inosine
ccacguuccugaugaggccguuaggccgaanauggugg

SEQ ID NO: 14091 - RNA, 38 nt, Artificial Sequence
  Description of Artificial Sequence:  Enzymatic Nucleic Acid
  misc_feature (31)..(31): n stands for inosine
ucccagcacugaugaggccguuaggccgaanuuaacca

SEQ ID NO: 14092 - RNA, 38 nt, Artificial Sequence
  Description of Artificial Sequence:  Enzymatic Nucleic Acid
  misc_feature (31)..(31): n stands for inosine
cucccagccugaugaggccguuaggccgaanguuaacc

SEQ ID NO: 14093 - RNA, 38 nt, Artificial Sequence
  Description of Artificial Sequence:  Enzymatic Nucleic Acid
  misc_feature (31)..(31): n stands for inosine
aggcuccccugaugaggccguuaggccgaancagguua

SEQ ID NO: 14094 - RNA, 38 nt, Artificial Sequence
  Description of Artificial Sequence:  Enzymatic Nucleic Acid
  misc_feature (31)..(31): n stands for inosine
uuggugcacugaugaggccguuaggccgaancucccag

SEQ ID NO: 14095 - RNA, 38 nt, Artificial Sequence
  Description of Artificial Sequence:  Enzymatic Nucleic Acid
  misc_feature (31)..(31): n stands for inosine
cuuggugccugaugaggccguuaggccgaangcuccca

SEQ ID NO: 14096 - RNA, 38 nt, Artificial Sequence
  Description of Artificial Sequence:  Enzymatic Nucleic Acid
  misc_feature (31)..(31): n stands for inosine
uugcuuggcugaugaggccguuaggccgaancaggcuc

SEQ ID NO: 14097 - RNA, 38 nt, Artificial Sequence
  Description of Artificial Sequence:  Enzymatic Nucleic Acid
  misc_feature (31)..(31): n stands for inosine
ccuugcuucugaugaggccguuaggccgaanugcaggc

SEQ ID NO: 14098 - RNA, 38 nt, Artificial Sequence
  Description of Artificial Sequence:  Enzymatic Nucleic Acid
  misc_feature (31)..(31): n stands for inosine
uccuugcucugaugaggccguuaggccgaangugcagg

SEQ ID NO: 14099 - RNA, 38 nt, Artificial Sequence
  Description of Artificial Sequence:  Enzymatic Nucleic Acid
  misc_feature (31)..(31): n stands for inosine
gcccuccucugaugaggccguuaggccgaancuuggug

SEQ ID NO: 14100 - RNA, 38 nt, Artificial Sequence
  Description of Artificial Sequence:  Enzymatic Nucleic Acid
  misc_feature (31)..(31): n stands for inosine
ccaucagacugaugaggccguuaggccgaancccuccu

SEQ ID NO: 14101 - RNA, 38 nt, Artificial Sequence
  Description of Artificial Sequence:  Enzymatic Nucleic Acid
  misc_feature (31)..(31): n stands for inosine
accaucagcugaugaggccguuaggccgaangcccucc

SEQ ID NO: 14102 - RNA, 38 nt, Artificial Sequence
  Description of Artificial Sequence:  Enzymatic Nucleic Acid
  misc_feature (31)..(31): n stands for inosine
ucaccauccugaugaggccguuaggccgaanaggcccu

SEQ ID NO: 14103 - RNA, 38 nt, Artificial Sequence
  Description of Artificial Sequence:  Enzymatic Nucleic Acid
  misc_feature (31)..(31): n stands for inosine
auauuugccugaugaggccguuaggccgaanuauucaa

SEQ ID NO: 14104 - RNA, 38 nt, Artificial Sequence
  Description of Artificial Sequence:  Enzymatic Nucleic Acid
  misc_feature (31)..(31): n stands for inosine
uccauauucugaugaggccguuaggccgaancaguauu

SEQ ID NO: 14105 - RNA, 38 nt, Artificial Sequence
  Description of Artificial Sequence:  Enzymatic Nucleic Acid
  misc_feature (31)..(31): n stands for inosine
aguuggagcugaugaggccguuaggccgaanauuucca

SEQ ID NO: 14106 - RNA, 38 nt, Artificial Sequence
  Description of Artificial Sequence:  Enzymatic Nucleic Acid
  misc_feature (31)..(31): n stands for inosine
guaguuggcugaugaggccguuaggccgaanagauuuc

SEQ ID NO: 14107 - RNA, 38 nt, Artificial Sequence
  Description of Artificial Sequence:  Enzymatic Nucleic Acid
  misc_feature (31)..(31): n stands for inosine
agguaguucugaugaggccguuaggccgaanagagauu

SEQ ID NO: 14108 - RNA, 38 nt, Artificial Sequence
  Description of Artificial Sequence:  Enzymatic Nucleic Acid
  misc_feature (31)..(31): n stands for inosine
gagguagucugaugaggccguuaggccgaangagagau

SEQ ID NO: 14109 - RNA, 38 nt, Artificial Sequence
  Description of Artificial Sequence:  Enzymatic Nucleic Acid
  misc_feature (31)..(31): n stands for inosine
cuugaggucugaugaggccguuaggccgaanuuggaga

SEQ ID NO: 14110 - RNA, 38 nt, Artificial Sequence
  Description of Artificial Sequence:  Enzymatic Nucleic Acid
  misc_feature (31)..(31): n stands for inosine
gcucuugacugaugaggccguuaggccgaanuaguugg

SEQ ID NO: 14111 - RNA, 38 nt, Artificial Sequence
  Description of Artificial Sequence:  Enzymatic Nucleic Acid
  misc_feature (31)..(31): n stands for inosine
ugcucuugcugaugaggccguuaggccgaanguaguug

SEQ ID NO: 14112 - RNA, 38 nt, Artificial Sequence
  Description of Artificial Sequence:  Enzymatic Nucleic Acid
  misc_feature (31)..(31): n stands for inosine
uuugcucucugaugaggccguuaggccgaanagguagu

SEQ ID NO: 14113 - RNA, 38 nt, Artificial Sequence
  Description of Artificial Sequence:  Enzymatic Nucleic Acid
  misc_feature (31)..(31): n stands for inosine
gucacguucugaugaggccguuaggccgaancucuuga

SEQ ID NO: 14114 - RNA, 38 nt, Artificial Sequence
  Description of Artificial Sequence:  Enzymatic Nucleic Acid
  misc_feature (31)..(31): n stands for inosine
aaaaaauacugaugaggccguuaggccgaanucacguu

SEQ ID NO: 14115 - RNA, 38 nt, Artificial Sequence
  Description of Artificial Sequence:  Enzymatic Nucleic Acid
  misc_feature (31)..(31): n stands for inosine
ccuuguugcugaugaggccguuaggccgaanaaaaaau

SEQ ID NO: 14116 - RNA, 38 nt, Artificial Sequence
  Description of Artificial Sequence:  Enzymatic Nucleic Acid
  misc_feature (31)..(31): n stands for inosine
auccuugucugaugaggccguuaggccgaanagaaaaa

SEQ ID NO: 14117 - RNA, 38 nt, Artificial Sequence
  Description of Artificial Sequence:  Enzymatic Nucleic Acid
  misc_feature (31)..(31): n stands for inosine
ugcauccucugaugaggccguuaggccgaanuugagaa

SEQ ID NO: 14118 - RNA, 38 nt, Artificial Sequence
  Description of Artificial Sequence:  Enzymatic Nucleic Acid
  misc_feature (31)..(31): n stands for inosine
uguagugccugaugaggccguuaggccgaancauccuu

SEQ ID NO: 14119 - RNA, 38 nt, Artificial Sequence
  Description of Artificial Sequence:  Enzymatic Nucleic Acid
  misc_feature (31)..(31): n stands for inosine
auguguagcugaugaggccguuaggccgaancugcauc

SEQ ID NO: 14120 - RNA, 38 nt, Artificial Sequence
  Description of Artificial Sequence:  Enzymatic Nucleic Acid
  misc_feature (31)..(31): n stands for inosine
ccaugugucugaugaggccguuaggccgaanugcugca

SEQ ID NO: 14121 - RNA, 38 nt, Artificial Sequence
  Description of Artificial Sequence:  Enzymatic Nucleic Acid
  misc_feature (31)..(31): n stands for inosine
gcuccaugcugaugaggccguuaggccgaanuagugcu

SEQ ID NO: 14122 - RNA, 38 nt, Artificial Sequence
  Description of Artificial Sequence:  Enzymatic Nucleic Acid
  misc_feature (31)..(31): n stands for inosine
aggcuccacugaugaggccguuaggccgaanuguagug

SEQ ID NO: 14123 - RNA, 38 nt, Artificial Sequence
  Description of Artificial Sequence:  Enzymatic Nucleic Acid
  misc_feature (31)..(31): n stands for inosine
cuuucuuacugaugaggccguuaggccgaancuccaug

SEQ ID NO: 14124 - RNA, 38 nt, Artificial Sequence
  Description of Artificial Sequence:  Enzymatic Nucleic Acid
  misc_feature (31)..(31): n stands for inosine
ucuuucuucugaugaggccguuaggccgaangcuccau

SEQ ID NO: 14125 - RNA, 38 nt, Artificial Sequence
  Description of Artificial Sequence:  Enzymatic Nucleic Acid
  misc_feature (31)..(31): n stands for inosine
ccaggccucugaugaggccguuaggccgaancuccauu

SEQ ID NO: 14126 - RNA, 38 nt, Artificial Sequence
  Description of Artificial Sequence:  Enzymatic Nucleic Acid
  misc_feature (31)..(31): n stands for inosine
uccaggcccugaugaggccguuaggccgaangcuccau

SEQ ID NO: 14127 - RNA, 38 nt, Artificial Sequence
  Description of Artificial Sequence:  Enzymatic Nucleic Acid
  misc_feature (31)..(31): n stands for inosine
uuguuccacugaugaggccguuaggccgaanccuggcu

SEQ ID NO: 14128 - RNA, 38 nt, Artificial Sequence
  Description of Artificial Sequence:  Enzymatic Nucleic Acid
  misc_feature (31)..(31): n stands for inosine
cuuguucccugaugaggccguuaggccgaangccuggc

SEQ ID NO: 14129 - RNA, 38 nt, Artificial Sequence
  Description of Artificial Sequence:  Enzymatic Nucleic Acid
  misc_feature (31)..(31): n stands for inosine
ucuugccucugaugaggccguuaggccgaanuuccagg

SEQ ID NO: 14130 - RNA, 38 nt, Artificial Sequence
  Description of Artificial Sequence:  Enzymatic Nucleic Acid
  misc_feature (31)..(31): n stands for inosine
ugguuucucugaugaggccguuaggccgaanccuuguu

SEQ ID NO: 14131 - RNA, 38 nt, Artificial Sequence
  Description of Artificial Sequence:  Enzymatic Nucleic Acid
  misc_feature (31)..(31): n stands for inosine
cuagucuucugaugaggccguuaggccgaanuuucuug

SEQ ID NO: 14132 - RNA, 38 nt, Artificial Sequence
  Description of Artificial Sequence:  Enzymatic Nucleic Acid
  misc_feature (31)..(31): n stands for inosine
ucuagucucugaugaggccguuaggccgaanguuucuu

SEQ ID NO: 14133 - RNA, 38 nt, Artificial Sequence
  Description of Artificial Sequence:  Enzymatic Nucleic Acid
  misc_feature (31)..(31): n stands for inosine
cgcuaucucugaugaggccguuaggccgaanucuuggu

SEQ ID NO: 14134 - RNA, 38 nt, Artificial Sequence
  Description of Artificial Sequence:  Enzymatic Nucleic Acid
  misc_feature (31)..(31): n stands for inosine
gcugcuggcugaugaggccguuaggccgaanacgcuau

SEQ ID NO: 14135 - RNA, 38 nt, Artificial Sequence
  Description of Artificial Sequence:  Enzymatic Nucleic Acid
  misc_feature (31)..(31): n stands for inosine
ucgcugcucugaugaggccguuaggccgaanugacgcu

SEQ ID NO: 14136 - RNA, 38 nt, Artificial Sequence
  Description of Artificial Sequence:  Enzymatic Nucleic Acid
  misc_feature (31)..(31): n stands for inosine
uucgcugccugaugaggccguuaggccgaangugacgc

SEQ ID NO: 14137 - RNA, 38 nt, Artificial Sequence
  Description of Artificial Sequence:  Enzymatic Nucleic Acid
  misc_feature (31)..(31): n stands for inosine
gcuuucgccugaugaggccguuaggccgaancugguga

SEQ ID NO: 14138 - RNA, 38 nt, Artificial Sequence
  Description of Artificial Sequence:  Enzymatic Nucleic Acid
  misc_feature (31)..(31): n stands for inosine
gcucgcaacugaugaggccguuaggccgaancuuucgc

SEQ ID NO: 14139 - RNA, 38 nt, Artificial Sequence
  Description of Artificial Sequence:  Enzymatic Nucleic Acid
  misc_feature (31)..(31): n stands for inosine
aaagccggcugaugaggccguuaggccgaancucgcaa

SEQ ID NO: 14140 - RNA, 38 nt, Artificial Sequence
  Description of Artificial Sequence:  Enzymatic Nucleic Acid
  misc_feature (31)..(31): n stands for inosine
ugaaagcccugaugaggccguuaggccgaanagcucgc

SEQ ID NO: 14141 - RNA, 38 nt, Artificial Sequence
  Description of Artificial Sequence:  Enzymatic Nucleic Acid
  misc_feature (31)..(31): n stands for inosine
uuccugaacugaugaggccguuaggccgaanccggagc

SEQ ID NO: 14142 - RNA, 38 nt, Artificial Sequence
  Description of Artificial Sequence:  Enzymatic Nucleic Acid
  misc_feature (31)..(31): n stands for inosine
uaucuucccugaugaggccguuaggccgaanaaagccg

SEQ ID NO: 14143 - RNA, 38 nt, Artificial Sequence
  Description of Artificial Sequence:  Enzymatic Nucleic Acid
  misc_feature (31)..(31): n stands for inosine
caucacuccugaugaggccguuaggccgaanacuuuua

SEQ ID NO: 14144 - RNA, 38 nt, Artificial Sequence
  Description of Artificial Sequence:  Enzymatic Nucleic Acid
  misc_feature (31)..(31): n stands for inosine
aaaccguccugaugaggccguuaggccgaanaauccuc

SEQ ID NO: 14145 - RNA, 38 nt, Artificial Sequence
  Description of Artificial Sequence:  Enzymatic Nucleic Acid
  misc_feature (31)..(31): n stands for inosine
cuccuugucugaugaggccguuaggccgaanaaaccgu

SEQ ID NO: 14146 - RNA, 38 nt, Artificial Sequence
  Description of Artificial Sequence:  Enzymatic Nucleic Acid
  misc_feature (31)..(31): n stands for inosine
gggcuccucugaugaggccguuaggccgaanuagaaac

SEQ ID NO: 14147 - RNA, 38 nt, Artificial Sequence
  Description of Artificial Sequence:  Enzymatic Nucleic Acid
  misc_feature (31)..(31): n stands for inosine
uagugaugcugaugaggccguuaggccgaancuccuug

SEQ ID NO: 14148 - RNA, 38 nt, Artificial Sequence
  Description of Artificial Sequence:  Enzymatic Nucleic Acid
  misc_feature (31)..(31): n stands for inosine
auagugaucugaugaggccguuaggccgaangcuccuu

SEQ ID NO: 14149 - RNA, 38 nt, Artificial Sequence
  Description of Artificial Sequence:  Enzymatic Nucleic Acid
  misc_feature (31)..(31): n stands for inosine
cauagugacugaugaggccguuaggccgaanggcuccu

SEQ ID NO: 14150 - RNA, 38 nt, Artificial Sequence
  Description of Artificial Sequence:  Enzymatic Nucleic Acid
  misc_feature (31)..(31): n stands for inosine
uuccauagcugaugaggccguuaggccgaanaugggcu

SEQ ID NO: 14151 - RNA, 38 nt, Artificial Sequence
  Description of Artificial Sequence:  Enzymatic Nucleic Acid
  misc_feature (31)..(31): n stands for inosine
ucuuccaucugaugaggccguuaggccgaanugauggg

SEQ ID NO: 14152 - RNA, 38 nt, Artificial Sequence
  Description of Artificial Sequence:  Enzymatic Nucleic Acid
  misc_feature (31)..(31): n stands for inosine
aagaaauccugaugaggccguuaggccgaanaucuucc

SEQ ID NO: 14153 - RNA, 38 nt, Artificial Sequence
  Description of Artificial Sequence:  Enzymatic Nucleic Acid
  misc_feature (31)..(31): n stands for inosine
aaacuguacugaugaggccguuaggccgaanaaaucag

SEQ ID NO: 14154 - RNA, 38 nt, Artificial Sequence
  Description of Artificial Sequence:  Enzymatic Nucleic Acid
  misc_feature (31)..(31): n stands for inosine
uugaaaaccugaugaggccguuaggccgaanuaagaaa

SEQ ID NO: 14155 - RNA, 38 nt, Artificial Sequence
  Description of Artificial Sequence:  Enzymatic Nucleic Acid
  misc_feature (31)..(31): n stands for inosine
uggccacucugaugaggccguuaggccgaanaaaacug

SEQ ID NO: 14156 - RNA, 38 nt, Artificial Sequence
  Description of Artificial Sequence:  Enzymatic Nucleic Acid
  misc_feature (31)..(31): n stands for inosine
augccucucugaugaggccguuaggccgaanccacuug

SEQ ID NO: 14157 - RNA, 38 nt, Artificial Sequence
  Description of Artificial Sequence:  Enzymatic Nucleic Acid
  misc_feature (31)..(31): n stands for inosine
caugccuccugaugaggccguuaggccgaangccacuu

SEQ ID NO: 14158 - RNA, 38 nt, Artificial Sequence
  Description of Artificial Sequence:  Enzymatic Nucleic Acid
  misc_feature (31)..(31): n stands for inosine
gaacuccacugaugaggccguuaggccgaanccucugg

SEQ ID NO: 14159 - RNA, 38 nt, Artificial Sequence
  Description of Artificial Sequence:  Enzymatic Nucleic Acid
  misc_feature (31)..(31): n stands for inosine
ggaagacacugaugaggccguuaggccgaanaacucca

SEQ ID NO: 14160 - RNA, 38 nt, Artificial Sequence
  Description of Artificial Sequence:  Enzymatic Nucleic Acid
  misc_feature (31)..(31): n stands for inosine
uggaagaccugaugaggccguuaggccgaangaacucc

SEQ ID NO: 14161 - RNA, 38 nt, Artificial Sequence
  Description of Artificial Sequence:  Enzymatic Nucleic Acid
  misc_feature (31)..(31): n stands for inosine
uuucuggacugaugaggccguuaggccgaanacaggaa

SEQ ID NO: 14162 - RNA, 38 nt, Artificial Sequence
  Description of Artificial Sequence:  Enzymatic Nucleic Acid
  misc_feature (31)..(31): n stands for inosine
cacuuucucugaugaggccguuaggccgaanaagacag

SEQ ID NO: 14163 - RNA, 38 nt, Artificial Sequence
  Description of Artificial Sequence:  Enzymatic Nucleic Acid
  misc_feature (31)..(31): n stands for inosine
gcacuuuccugaugaggccguuaggccgaangaagaca

SEQ ID NO: 14164 - RNA, 38 nt, Artificial Sequence
  Description of Artificial Sequence:  Enzymatic Nucleic Acid
  misc_feature (31)..(31): n stands for inosine
ccgaugaacugaugaggccguuaggccgaancacuuuc

SEQ ID NO: 14165 - RNA, 38 nt, Artificial Sequence
  Description of Artificial Sequence:  Enzymatic Nucleic Acid
  misc_feature (31)..(31): n stands for inosine
ggucccgacugaugaggccguuaggccgaanaaugcac

SEQ ID NO: 14166 - RNA, 38 nt, Artificial Sequence
  Description of Artificial Sequence:  Enzymatic Nucleic Acid
  misc_feature (31)..(31): n stands for inosine
cgcugccacugaugaggccguuaggccgaanucccgau

SEQ ID NO: 14167 - RNA, 38 nt, Artificial Sequence
  Description of Artificial Sequence:  Enzymatic Nucleic Acid
  misc_feature (31)..(31): n stands for inosine
ucgcugcccugaugaggccguuaggccgaangucccga

SEQ ID NO: 14168 - RNA, 38 nt, Artificial Sequence
  Description of Artificial Sequence:  Enzymatic Nucleic Acid
  misc_feature (31)..(31): n stands for inosine
uuucucgccugaugaggccguuaggccgaanccagguc

SEQ ID NO: 14169 - RNA, 38 nt, Artificial Sequence
  Description of Artificial Sequence:  Enzymatic Nucleic Acid
  misc_feature (31)..(31): n stands for inosine
uaaaagaacugaugaggccguuaggccgaanuuucucg

SEQ ID NO: 14170 - RNA, 38 nt, Artificial Sequence
  Description of Artificial Sequence:  Enzymatic Nucleic Acid
  misc_feature (31)..(31): n stands for inosine
cagauaaacugaugaggccguuaggccgaanaauguuu

SEQ ID NO: 14171 - RNA, 38 nt, Artificial Sequence
  Description of Artificial Sequence:  Enzymatic Nucleic Acid
  misc_feature (31)..(31): n stands for inosine
uuguucuccugaugaggccguuaggccgaanauaaaag

SEQ ID NO: 14172 - RNA, 38 nt, Artificial Sequence
  Description of Artificial Sequence:  Enzymatic Nucleic Acid
  misc_feature (31)..(31): n stands for inosine
caccacgucugaugaggccguuaggccgaanuucucag

SEQ ID NO: 14173 - RNA, 38 nt, Artificial Sequence
  Description of Artificial Sequence:  Enzymatic Nucleic Acid
  misc_feature (31)..(31): n stands for inosine
ccgggcaacugaugaggccguuaggccgaanccaaaau

SEQ ID NO: 14174 - RNA, 38 nt, Artificial Sequence
  Description of Artificial Sequence:  Enzymatic Nucleic Acid
  misc_feature (31)..(31): n stands for inosine
cccgggcacugaugaggccguuaggccgaangccaaaa

SEQ ID NO: 14175 - RNA, 38 nt, Artificial Sequence
  Description of Artificial Sequence:  Enzymatic Nucleic Acid
  misc_feature (31)..(31): n stands for inosine
auaucccgcugaugaggccguuaggccgaancaaggcc

SEQ ID NO: 14176 - RNA, 38 nt, Artificial Sequence
  Description of Artificial Sequence:  Enzymatic Nucleic Acid
  misc_feature (31)..(31): n stands for inosine
aauauccccugaugaggccguuaggccgaangcaaggc

SEQ ID NO: 14177 - RNA, 38 nt, Artificial Sequence
  Description of Artificial Sequence:  Enzymatic Nucleic Acid
  misc_feature (31)..(31): n stands for inosine
auaaucggcugaugaggccguuaggccgaanuucuuau

SEQ ID NO: 14178 - RNA, 38 nt, Artificial Sequence
  Description of Artificial Sequence:  Enzymatic Nucleic Acid
  misc_feature (31)..(31): n stands for inosine
cauaaucgcugaugaggccguuaggccgaanguucuua

SEQ ID NO: 14179 - RNA, 38 nt, Artificial Sequence
  Description of Artificial Sequence:  Enzymatic Nucleic Acid
  misc_feature (31)..(31): n stands for inosine
acauaauccugaugaggccguuaggccgaangguucuu

SEQ ID NO: 14180 - RNA, 38 nt, Artificial Sequence
  Description of Artificial Sequence:  Enzymatic Nucleic Acid
  misc_feature (31)..(31): n stands for inosine
ggaagucgcugaugaggccguuaggccgaanuaucucc

SEQ ID NO: 14181 - RNA, 38 nt, Artificial Sequence
  Description of Artificial Sequence:  Enzymatic Nucleic Acid
  misc_feature (31)..(31): n stands for inosine
ucagaggacugaugaggccguuaggccgaanucgagua

SEQ ID NO: 14182 - RNA, 38 nt, Artificial Sequence
  Description of Artificial Sequence:  Enzymatic Nucleic Acid
  misc_feature (31)..(31): n stands for inosine
auuucagacugaugaggccguuaggccgaanaagucga

SEQ ID NO: 14183 - RNA, 38 nt, Artificial Sequence
  Description of Artificial Sequence:  Enzymatic Nucleic Acid
  misc_feature (31)..(31): n stands for inosine
cauuucagcugaugaggccguuaggccgaangaagucg

SEQ ID NO: 14184 - RNA, 38 nt, Artificial Sequence
  Description of Artificial Sequence:  Enzymatic Nucleic Acid
  misc_feature (31)..(31): n stands for inosine
uccauuuccugaugaggccguuaggccgaanaggaagu

SEQ ID NO: 14185 - RNA, 38 nt, Artificial Sequence
  Description of Artificial Sequence:  Enzymatic Nucleic Acid
  misc_feature (31)..(31): n stands for inosine
gauucgggcugaugaggccguuaggccgaanccaucca

SEQ ID NO: 14186 - RNA, 38 nt, Artificial Sequence
  Description of Artificial Sequence:  Enzymatic Nucleic Acid
  misc_feature (31)..(31): n stands for inosine
uagauucgcugaugaggccguuaggccgaanagccauc

SEQ ID NO: 14187 - RNA, 38 nt, Artificial Sequence
  Description of Artificial Sequence:  Enzymatic Nucleic Acid
  misc_feature (31)..(31): n stands for inosine
auagauuccugaugaggccguuaggccgaangagccau

SEQ ID NO: 14188 - RNA, 38 nt, Artificial Sequence
  Description of Artificial Sequence:  Enzymatic Nucleic Acid
  misc_feature (31)..(31): n stands for inosine
ucaaagaucugaugaggccguuaggccgaanauucggg

SEQ ID NO: 14189 - RNA, 38 nt, Artificial Sequence
  Description of Artificial Sequence:  Enzymatic Nucleic Acid
  misc_feature (31)..(31): n stands for inosine
uuugucaacugaugaggccguuaggccgaanauagauu

SEQ ID NO: 14190 - RNA, 38 nt, Artificial Sequence
  Description of Artificial Sequence:  Enzymatic Nucleic Acid
  misc_feature (31)..(31): n stands for inosine
guagauuucugaugaggccguuaggccgaanucaaaga

SEQ ID NO: 14191 - RNA, 38 nt, Artificial Sequence
  Description of Artificial Sequence:  Enzymatic Nucleic Acid
  misc_feature (31)..(31): n stands for inosine
ggugcugucugaugaggccguuaggccgaanauuuugu

SEQ ID NO: 14192 - RNA, 38 nt, Artificial Sequence
  Description of Artificial Sequence:  Enzymatic Nucleic Acid
  misc_feature (31)..(31): n stands for inosine
cuuggugccugaugaggccguuaggccgaanuagauuu

SEQ ID NO: 14193 - RNA, 38 nt, Artificial Sequence
  Description of Artificial Sequence:  Enzymatic Nucleic Acid
  misc_feature (31)..(31): n stands for inosine
gcucuuggcugaugaggccguuaggccgaancuguaga

SEQ ID NO: 14194 - RNA, 38 nt, Artificial Sequence
  Description of Artificial Sequence:  Enzymatic Nucleic Acid
  misc_feature (31)..(31): n stands for inosine
ucgcucuucugaugaggccguuaggccgaanugcugua

SEQ ID NO: 14195 - RNA, 38 nt, Artificial Sequence
  Description of Artificial Sequence:  Enzymatic Nucleic Acid
  misc_feature (31)..(31): n stands for inosine
gucgcucucugaugaggccguuaggccgaangugcugu

SEQ ID NO: 14196 - RNA, 38 nt, Artificial Sequence
  Description of Artificial Sequence:  Enzymatic Nucleic Acid
  misc_feature (31)..(31): n stands for inosine
acuccguacugaugaggccguuaggccgaanaccacac

SEQ ID NO: 14197 - RNA, 38 nt, Artificial Sequence
  Description of Artificial Sequence:  Enzymatic Nucleic Acid
  misc_feature (31)..(31): n stands for inosine
uuucccaccugaugaggccguuaggccgaancaauacu

SEQ ID NO: 14198 - RNA, 38 nt, Artificial Sequence
  Description of Artificial Sequence:  Enzymatic Nucleic Acid
  misc_feature (31)..(31): n stands for inosine
uaaggagacugaugaggccguuaggccgaanauuuccc

SEQ ID NO: 14199 - RNA, 38 nt, Artificial Sequence
  Description of Artificial Sequence:  Enzymatic Nucleic Acid
  misc_feature (31)..(31): n stands for inosine
accuaaggcugaugaggccguuaggccgaanaagauuu

SEQ ID NO: 14200 - RNA, 38 nt, Artificial Sequence
  Description of Artificial Sequence:  Enzymatic Nucleic Acid
  misc_feature (31)..(31): n stands for inosine
ccaccuaacugaugaggccguuaggccgaanagaagau

SEQ ID NO: 14201 - RNA, 38 nt, Artificial Sequence
  Description of Artificial Sequence:  Enzymatic Nucleic Acid
  misc_feature (31)..(31): n stands for inosine
cccaccuacugaugaggccguuaggccgaangagaaga

SEQ ID NO: 14202 - RNA, 38 nt, Artificial Sequence
  Description of Artificial Sequence:  Enzymatic Nucleic Acid
  misc_feature (31)..(31): n stands for inosine
ggguauggcugaugaggccguuaggccgaanacccacc

SEQ ID NO: 14203 - RNA, 38 nt, Artificial Sequence
  Description of Artificial Sequence:  Enzymatic Nucleic Acid
  misc_feature (31)..(31): n stands for inosine
cuggguaucugaugaggccguuaggccgaanagaccca

SEQ ID NO: 14204 - RNA, 38 nt, Artificial Sequence
  Description of Artificial Sequence:  Enzymatic Nucleic Acid
  misc_feature (31)..(31): n stands for inosine
ccuggguacugaugaggccguuaggccgaangagaccc

SEQ ID NO: 14205 - RNA, 38 nt, Artificial Sequence
  Description of Artificial Sequence:  Enzymatic Nucleic Acid
  misc_feature (31)..(31): n stands for inosine
uacuccugcugaugaggccguuaggccgaanuauggag

SEQ ID NO: 14206 - RNA, 38 nt, Artificial Sequence
  Description of Artificial Sequence:  Enzymatic Nucleic Acid
  misc_feature (31)..(31): n stands for inosine
guacuccucugaugaggccguuaggccgaanguaugga

SEQ ID NO: 14207 - RNA, 38 nt, Artificial Sequence
  Description of Artificial Sequence:  Enzymatic Nucleic Acid
  misc_feature (31)..(31): n stands for inosine
uguacucccugaugaggccguuaggccgaangguaugg

SEQ ID NO: 14208 - RNA, 38 nt, Artificial Sequence
  Description of Artificial Sequence:  Enzymatic Nucleic Acid
  misc_feature (31)..(31): n stands for inosine
cauccauucugaugaggccguuaggccgaanuacuccu

SEQ ID NO: 14209 - RNA, 38 nt, Artificial Sequence
  Description of Artificial Sequence:  Enzymatic Nucleic Acid
  misc_feature (31)..(31): n stands for inosine
acugcaaacugaugaggccguuaggccgaanuccucau

SEQ ID NO: 14210 - RNA, 38 nt, Artificial Sequence
  Description of Artificial Sequence:  Enzymatic Nucleic Acid
  misc_feature (31)..(31): n stands for inosine
caggcgaccugaugaggccguuaggccgaancaaaagu

SEQ ID NO: 14211 - RNA, 38 nt, Artificial Sequence
  Description of Artificial Sequence:  Enzymatic Nucleic Acid
  misc_feature (31)..(31): n stands for inosine
uucccucacugaugaggccguuaggccgaancgacugc

SEQ ID NO: 14212 - RNA, 38 nt, Artificial Sequence
  Description of Artificial Sequence:  Enzymatic Nucleic Acid
  misc_feature (31)..(31): n stands for inosine
cuucccuccugaugaggccguuaggccgaangcgacug

SEQ ID NO: 14213 - RNA, 38 nt, Artificial Sequence
  Description of Artificial Sequence:  Enzymatic Nucleic Acid
  misc_feature (31)..(31): n stands for inosine
cauccucacugaugaggccguuaggccgaanccuuccc

SEQ ID NO: 14214 - RNA, 38 nt, Artificial Sequence
  Description of Artificial Sequence:  Enzymatic Nucleic Acid
  misc_feature (31)..(31): n stands for inosine
uacucaggcugaugaggccguuaggccgaancucucau

SEQ ID NO: 14215 - RNA, 38 nt, Artificial Sequence
  Description of Artificial Sequence:  Enzymatic Nucleic Acid
  misc_feature (31)..(31): n stands for inosine
aguacucacugaugaggccguuaggccgaanagcucuc

SEQ ID NO: 14216 - RNA, 38 nt, Artificial Sequence
  Description of Artificial Sequence:  Enzymatic Nucleic Acid
  misc_feature (31)..(31): n stands for inosine
gaguacuccugaugaggccguuaggccgaangagcucu

SEQ ID NO: 14217 - RNA, 38 nt, Artificial Sequence
  Description of Artificial Sequence:  Enzymatic Nucleic Acid
  misc_feature (31)..(31): n stands for inosine
aggaguagcugaugaggccguuaggccgaanuacucag

SEQ ID NO: 14218 - RNA, 38 nt, Artificial Sequence
  Description of Artificial Sequence:  Enzymatic Nucleic Acid
  misc_feature (31)..(31): n stands for inosine
ucaggagucugaugaggccguuaggccgaanaguacuc

SEQ ID NO: 14219 - RNA, 38 nt, Artificial Sequence
  Description of Artificial Sequence:  Enzymatic Nucleic Acid
  misc_feature (31)..(31): n stands for inosine
auuucaggcugaugaggccguuaggccgaanuagagua

SEQ ID NO: 14220 - RNA, 38 nt, Artificial Sequence
  Description of Artificial Sequence:  Enzymatic Nucleic Acid
  misc_feature (31)..(31): n stands for inosine
agauuucacugaugaggccguuaggccgaanaguagag

SEQ ID NO: 14221 - RNA, 38 nt, Artificial Sequence
  Description of Artificial Sequence:  Enzymatic Nucleic Acid
  misc_feature (31)..(31): n stands for inosine
uagauuuccugaugaggccguuaggccgaangaguaga

SEQ ID NO: 14222 - RNA, 38 nt, Artificial Sequence
  Description of Artificial Sequence:  Enzymatic Nucleic Acid
  misc_feature (31)..(31): n stands for inosine
gaucugaucugaugaggccguuaggccgaanauuucag

SEQ ID NO: 14223 - RNA, 38 nt, Artificial Sequence
  Description of Artificial Sequence:  Enzymatic Nucleic Acid
  misc_feature (31)..(31): n stands for inosine
gcaugauccugaugaggccguuaggccgaanauagauu

SEQ ID NO: 14224 - RNA, 38 nt, Artificial Sequence
  Description of Artificial Sequence:  Enzymatic Nucleic Acid
  misc_feature (31)..(31): n stands for inosine
guccagcacugaugaggccguuaggccgaanaucugau

SEQ ID NO: 14225 - RNA, 38 nt, Artificial Sequence
  Description of Artificial Sequence:  Enzymatic Nucleic Acid
  misc_feature (31)..(31): n stands for inosine
agcagucccugaugaggccguuaggccgaancaugauc

SEQ ID NO: 14226 - RNA, 38 nt, Artificial Sequence
  Description of Artificial Sequence:  Enzymatic Nucleic Acid
  misc_feature (31)..(31): n stands for inosine
gugccagccugaugaggccguuaggccgaanuccagca

SEQ ID NO: 14227 - RNA, 38 nt, Artificial Sequence
  Description of Artificial Sequence:  Enzymatic Nucleic Acid
  misc_feature (31)..(31): n stands for inosine
ucugugcccugaugaggccguuaggccgaancagucca

SEQ ID NO: 14228 - RNA, 38 nt, Artificial Sequence
  Description of Artificial Sequence:  Enzymatic Nucleic Acid
  misc_feature (31)..(31): n stands for inosine
ggucucugcugaugaggccguuaggccgaanccagcag

SEQ ID NO: 14229 - RNA, 38 nt, Artificial Sequence
  Description of Artificial Sequence:  Enzymatic Nucleic Acid
  misc_feature (31)..(31): n stands for inosine
ugggucuccugaugaggccguuaggccgaanugccagc

SEQ ID NO: 14230 - RNA, 38 nt, Artificial Sequence
  Description of Artificial Sequence:  Enzymatic Nucleic Acid
  misc_feature (31)..(31): n stands for inosine
uucuuuugcugaugaggccguuaggccgaanucucugu

SEQ ID NO: 14231 - RNA, 38 nt, Artificial Sequence
  Description of Artificial Sequence:  Enzymatic Nucleic Acid
  misc_feature (31)..(31): n stands for inosine
uuucuuuucugaugaggccguuaggccgaangucucug

SEQ ID NO: 14232 - RNA, 38 nt, Artificial Sequence
  Description of Artificial Sequence:  Enzymatic Nucleic Acid
  misc_feature (31)..(31): n stands for inosine
cuuucuuucugaugaggccguuaggccgaanggucucu

SEQ ID NO: 14233 - RNA, 38 nt, Artificial Sequence
  Description of Artificial Sequence:  Enzymatic Nucleic Acid
  misc_feature (31)..(31): n stands for inosine
caaaucuucugaugaggccguuaggccgaanccuuucu

SEQ ID NO: 14234 - RNA, 38 nt, Artificial Sequence
  Description of Artificial Sequence:  Enzymatic Nucleic Acid
  misc_feature (31)..(31): n stands for inosine
gcaaaucucugaugaggccguuaggccgaangccuuuc

SEQ ID NO: 14235 - RNA, 38 nt, Artificial Sequence
  Description of Artificial Sequence:  Enzymatic Nucleic Acid
  misc_feature (31)..(31): n stands for inosine
acaaguuccugaugaggccguuaggccgaancaaaucu

SEQ ID NO: 14236 - RNA, 38 nt, Artificial Sequence
  Description of Artificial Sequence:  Enzymatic Nucleic Acid
  misc_feature (31)..(31): n stands for inosine
uuuccacacugaugaggccguuaggccgaanuucugca

SEQ ID NO: 14237 - RNA, 38 nt, Artificial Sequence
  Description of Artificial Sequence:  Enzymatic Nucleic Acid
  misc_feature (31)..(31): n stands for inosine
aaucaccucugaugaggccguuaggccgaanuuuuucc

SEQ ID NO: 14238 - RNA, 38 nt, Artificial Sequence
  Description of Artificial Sequence:  Enzymatic Nucleic Acid
  misc_feature (31)..(31): n stands for inosine
uugcuugacugaugaggccguuaggccgaancaaauca

SEQ ID NO: 14239 - RNA, 38 nt, Artificial Sequence
  Description of Artificial Sequence:  Enzymatic Nucleic Acid
  misc_feature (31)..(31): n stands for inosine
cauuugcucugaugaggccguuaggccgaanaagcaaa

SEQ ID NO: 14240 - RNA, 38 nt, Artificial Sequence
  Description of Artificial Sequence:  Enzymatic Nucleic Acid
  misc_feature (31)..(31): n stands for inosine
uguacauucugaugaggccguuaggccgaancuugaag

SEQ ID NO: 14241 - RNA, 38 nt, Artificial Sequence
  Description of Artificial Sequence:  Enzymatic Nucleic Acid
  misc_feature (31)..(31): n stands for inosine
cauccugucugaugaggccguuaggccgaanuacauuu

SEQ ID NO: 14242 - RNA, 38 nt, Artificial Sequence
  Description of Artificial Sequence:  Enzymatic Nucleic Acid
  misc_feature (31)..(31): n stands for inosine
uaccaucccugaugaggccguuaggccgaanuuguaca

SEQ ID NO: 14243 - RNA, 38 nt, Artificial Sequence
  Description of Artificial Sequence:  Enzymatic Nucleic Acid
  misc_feature (31)..(31): n stands for inosine
ugggaugucugaugaggccguuaggccgaanucuuuac

SEQ ID NO: 14244 - RNA, 38 nt, Artificial Sequence
  Description of Artificial Sequence:  Enzymatic Nucleic Acid
  misc_feature (31)..(31): n stands for inosine
gauugggacugaugaggccguuaggccgaanuagucuu

SEQ ID NO: 14245 - RNA, 38 nt, Artificial Sequence
  Description of Artificial Sequence:  Enzymatic Nucleic Acid
  misc_feature (31)..(31): n stands for inosine
auugauugcugaugaggccguuaggccgaanauguagu

SEQ ID NO: 14246 - RNA, 38 nt, Artificial Sequence
  Description of Artificial Sequence:  Enzymatic Nucleic Acid
  misc_feature (31)..(31): n stands for inosine
cauugauucugaugaggccguuaggccgaangauguag

SEQ ID NO: 14247 - RNA, 38 nt, Artificial Sequence
  Description of Artificial Sequence:  Enzymatic Nucleic Acid
  misc_feature (31)..(31): n stands for inosine
gcauugaucugaugaggccguuaggccgaanggaugua

SEQ ID NO: 14248 - RNA, 38 nt, Artificial Sequence
  Description of Artificial Sequence:  Enzymatic Nucleic Acid
  misc_feature (31)..(31): n stands for inosine
uauggcaucugaugaggccguuaggccgaanauuggga

SEQ ID NO: 14249 - RNA, 38 nt, Artificial Sequence
  Description of Artificial Sequence:  Enzymatic Nucleic Acid
  misc_feature (31)..(31): n stands for inosine
gucaguaucugaugaggccguuaggccgaancauugau

SEQ ID NO: 14250 - RNA, 38 nt, Artificial Sequence
  Description of Artificial Sequence:  Enzymatic Nucleic Acid
  misc_feature (31)..(31): n stands for inosine
ugucaguacugaugaggccguuaggccgaangcauuga

SEQ ID NO: 14251 - RNA, 38 nt, Artificial Sequence
  Description of Artificial Sequence:  Enzymatic Nucleic Acid
  misc_feature (31)..(31): n stands for inosine
uuccuguccugaugaggccguuaggccgaanuauggca

SEQ ID NO: 14252 - RNA, 38 nt, Artificial Sequence
  Description of Artificial Sequence:  Enzymatic Nucleic Acid
  misc_feature (31)..(31): n stands for inosine
cuauuucccugaugaggccguuaggccgaanucaguau

SEQ ID NO: 14253 - RNA, 38 nt, Artificial Sequence
  Description of Artificial Sequence:  Enzymatic Nucleic Acid
  misc_feature (31)..(31): n stands for inosine
guugaguacugaugaggccguuaggccgaanuaaaccc

SEQ ID NO: 14254 - RNA, 38 nt, Artificial Sequence
  Description of Artificial Sequence:  Enzymatic Nucleic Acid
  misc_feature (31)..(31): n stands for inosine
aggaguugcugaugaggccguuaggccgaanuauguaa

SEQ ID NO: 14255 - RNA, 38 nt, Artificial Sequence
  Description of Artificial Sequence:  Enzymatic Nucleic Acid
  misc_feature (31)..(31): n stands for inosine
gcaggagucugaugaggccguuaggccgaanaguaugu

SEQ ID NO: 14256 - RNA, 38 nt, Artificial Sequence
  Description of Artificial Sequence:  Enzymatic Nucleic Acid
  misc_feature (31)..(31): n stands for inosine
aaggcaggcugaugaggccguuaggccgaanuugagua

SEQ ID NO: 14257 - RNA, 38 nt, Artificial Sequence
  Description of Artificial Sequence:  Enzymatic Nucleic Acid
  misc_feature (31)..(31): n stands for inosine
agaaggcacugaugaggccguuaggccgaanaguugag

SEQ ID NO: 14258 - RNA, 38 nt, Artificial Sequence
  Description of Artificial Sequence:  Enzymatic Nucleic Acid
  misc_feature (31)..(31): n stands for inosine
gagaaggccugaugaggccguuaggccgaangaguuga

SEQ ID NO: 14259 - RNA, 38 nt, Artificial Sequence
  Description of Artificial Sequence:  Enzymatic Nucleic Acid
  misc_feature (31)..(31): n stands for inosine
ucagagaacugaugaggccguuaggccgaancaggagu

SEQ ID NO: 14260 - RNA, 38 nt, Artificial Sequence
  Description of Artificial Sequence:  Enzymatic Nucleic Acid
  misc_feature (31)..(31): n stands for inosine
cucagagacugaugaggccguuaggccgaangcaggag

SEQ ID NO: 14261 - RNA, 38 nt, Artificial Sequence
  Description of Artificial Sequence:  Enzymatic Nucleic Acid
  misc_feature (31)..(31): n stands for inosine
guccucagcugaugaggccguuaggccgaanaaggcag

SEQ ID NO: 14262 - RNA, 38 nt, Artificial Sequence
  Description of Artificial Sequence:  Enzymatic Nucleic Acid
  misc_feature (31)..(31): n stands for inosine
aaguccuccugaugaggccguuaggccgaanagaaggc

SEQ ID NO: 14263 - RNA, 38 nt, Artificial Sequence
  Description of Artificial Sequence:  Enzymatic Nucleic Acid
  misc_feature (31)..(31): n stands for inosine
cuugaagacugaugaggccguuaggccgaanuccucag

SEQ ID NO: 14264 - RNA, 38 nt, Artificial Sequence
  Description of Artificial Sequence:  Enzymatic Nucleic Acid
  misc_feature (31)..(31): n stands for inosine
uuccuugacugaugaggccguuaggccgaanaaguccu

SEQ ID NO: 14265 - RNA, 38 nt, Artificial Sequence
  Description of Artificial Sequence:  Enzymatic Nucleic Acid
  misc_feature (31)..(31): n stands for inosine
acuuuccucugaugaggccguuaggccgaanaagaagu

SEQ ID NO: 14266 - RNA, 38 nt, Artificial Sequence
  Description of Artificial Sequence:  Enzymatic Nucleic Acid
  misc_feature (31)..(31): n stands for inosine
uucggagccugaugaggccguuaggccgaanaaauacu

SEQ ID NO: 14267 - RNA, 38 nt, Artificial Sequence
  Description of Artificial Sequence:  Enzymatic Nucleic Acid
  misc_feature (31)..(31): n stands for inosine
aacuucggcugaugaggccguuaggccgaancugaaau

SEQ ID NO: 14268 - RNA, 38 nt, Artificial Sequence
  Description of Artificial Sequence:  Enzymatic Nucleic Acid
  misc_feature (31)..(31): n stands for inosine
uaaacuuccugaugaggccguuaggccgaanagcugaa

SEQ ID NO: 14269 - RNA, 38 nt, Artificial Sequence
  Description of Artificial Sequence:  Enzymatic Nucleic Acid
  misc_feature (31)..(31): n stands for inosine
gagcuucccugaugaggccguuaggccgaanaauuaaa

SEQ ID NO: 14270 - RNA, 38 nt, Artificial Sequence
  Description of Artificial Sequence:  Enzymatic Nucleic Acid
  misc_feature (31)..(31): n stands for inosine
aucaucagcugaugaggccguuaggccgaancuuccug

SEQ ID NO: 14271 - RNA, 38 nt, Artificial Sequence
  Description of Artificial Sequence:  Enzymatic Nucleic Acid
  misc_feature (31)..(31): n stands for inosine
acaucauccugaugaggccguuaggccgaanagcuucc

SEQ ID NO: 14272 - RNA, 38 nt, Artificial Sequence
  Description of Artificial Sequence:  Enzymatic Nucleic Acid
  misc_feature (31)..(31): n stands for inosine
uacauauccugaugaggccguuaggccgaanacaucau

SEQ ID NO: 14273 - RNA, 38 nt, Artificial Sequence
  Description of Artificial Sequence:  Enzymatic Nucleic Acid
  misc_feature (31)..(31): n stands for inosine
aacuugaacugaugaggccguuaggccgaancauuuac

SEQ ID NO: 14274 - RNA, 38 nt, Artificial Sequence
  Description of Artificial Sequence:  Enzymatic Nucleic Acid
  misc_feature (31)..(31): n stands for inosine
caugaacucugaugaggccguuaggccgaanaaagcau

SEQ ID NO: 14275 - RNA, 38 nt, Artificial Sequence
  Description of Artificial Sequence:  Enzymatic Nucleic Acid
  misc_feature (31)..(31): n stands for inosine
caggcucacugaugaggccguuaggccgaanaacuuga

SEQ ID NO: 14276 - RNA, 38 nt, Artificial Sequence
  Description of Artificial Sequence:  Enzymatic Nucleic Acid
  misc_feature (31)..(31): n stands for inosine
ucuuuccacugaugaggccguuaggccgaancucauga

SEQ ID NO: 14277 - RNA, 38 nt, Artificial Sequence
  Description of Artificial Sequence:  Enzymatic Nucleic Acid
  misc_feature (31)..(31): n stands for inosine
uucuuucccugaugaggccguuaggccgaangcucaug

SEQ ID NO: 14278 - RNA, 38 nt, Artificial Sequence
  Description of Artificial Sequence:  Enzymatic Nucleic Acid
  misc_feature (31)..(31): n stands for inosine
aaagguuucugaugaggccguuaggccgaanauucuuu

SEQ ID NO: 14279 - RNA, 38 nt, Artificial Sequence
  Description of Artificial Sequence:  Enzymatic Nucleic Acid
  misc_feature (31)..(31): n stands for inosine
ucuucaaacugaugaggccguuaggccgaanuuuugau

SEQ ID NO: 14280 - RNA, 38 nt, Artificial Sequence
  Description of Artificial Sequence:  Enzymatic Nucleic Acid
  misc_feature (31)..(31): n stands for inosine
uucuucaacugaugaggccguuaggccgaanguuuuga

SEQ ID NO: 14281 - RNA, 38 nt, Artificial Sequence
  Description of Artificial Sequence:  Enzymatic Nucleic Acid
  misc_feature (31)..(31): n stands for inosine
ucgguaaacugaugaggccguuaggccgaanuucuuca

SEQ ID NO: 14282 - RNA, 38 nt, Artificial Sequence
  Description of Artificial Sequence:  Enzymatic Nucleic Acid
  misc_feature (31)..(31): n stands for inosine
uggcauuccugaugaggccguuaggccgaanuaaaagu

SEQ ID NO: 14283 - RNA, 38 nt, Artificial Sequence
  Description of Artificial Sequence:  Enzymatic Nucleic Acid
  misc_feature (31)..(31): n stands for inosine
auggaggucugaugaggccguuaggccgaancauucgg

SEQ ID NO: 14284 - RNA, 38 nt, Artificial Sequence
  Description of Artificial Sequence:  Enzymatic Nucleic Acid
  misc_feature (31)..(31): n stands for inosine
cauggaggcugaugaggccguuaggccgaangcauucg

SEQ ID NO: 14285 - RNA, 38 nt, Artificial Sequence
  Description of Artificial Sequence:  Enzymatic Nucleic Acid
  misc_feature (31)..(31): n stands for inosine
aacauggacugaugaggccguuaggccgaanuggcauu

SEQ ID NO: 14286 - RNA, 38 nt, Artificial Sequence
  Description of Artificial Sequence:  Enzymatic Nucleic Acid
  misc_feature (31)..(31): n stands for inosine
aaacauggcugaugaggccguuaggccgaanguggcau

SEQ ID NO: 14287 - RNA, 38 nt, Artificial Sequence
  Description of Artificial Sequence:  Enzymatic Nucleic Acid
  misc_feature (31)..(31): n stands for inosine
ucaaacaucugaugaggccguuaggccgaanagguggc

SEQ ID NO: 14288 - RNA, 38 nt, Artificial Sequence
  Description of Artificial Sequence:  Enzymatic Nucleic Acid
  misc_feature (31)..(31): n stands for inosine
aucaaacacugaugaggccguuaggccgaangaggugg

SEQ ID NO: 14289 - RNA, 38 nt, Artificial Sequence
  Description of Artificial Sequence:  Enzymatic Nucleic Acid
  misc_feature (31)..(31): n stands for inosine
gcccuggucugaugaggccguuaggccgaanucaucaa

SEQ ID NO: 14290 - RNA, 38 nt, Artificial Sequence
  Description of Artificial Sequence:  Enzymatic Nucleic Acid
  misc_feature (31)..(31): n stands for inosine
gucgcccucugaugaggccguuaggccgaanuagucau

SEQ ID NO: 14291 - RNA, 38 nt, Artificial Sequence
  Description of Artificial Sequence:  Enzymatic Nucleic Acid
  misc_feature (31)..(31): n stands for inosine
ugucgccccugaugaggccguuaggccgaanguaguca

SEQ ID NO: 14292 - RNA, 38 nt, Artificial Sequence
  Description of Artificial Sequence:  Enzymatic Nucleic Acid
  misc_feature (31)..(31): n stands for inosine
agugcugccugaugaggccguuaggccgaanucgcccu

SEQ ID NO: 14293 - RNA, 38 nt, Artificial Sequence
  Description of Artificial Sequence:  Enzymatic Nucleic Acid
  misc_feature (31)..(31): n stands for inosine
cagagugccugaugaggccguuaggccgaancugucgc

SEQ ID NO: 14294 - RNA, 38 nt, Artificial Sequence
  Description of Artificial Sequence:  Enzymatic Nucleic Acid
  misc_feature (31)..(31): n stands for inosine
caacagagcugaugaggccguuaggccgaancugcugu

SEQ ID NO: 14295 - RNA, 38 nt, Artificial Sequence
  Description of Artificial Sequence:  Enzymatic Nucleic Acid
  misc_feature (31)..(31): n stands for inosine
gccaacagcugaugaggccguuaggccgaanugcugcu

SEQ ID NO: 14296 - RNA, 38 nt, Artificial Sequence
  Description of Artificial Sequence:  Enzymatic Nucleic Acid
  misc_feature (31)..(31): n stands for inosine
aggccaaccugaugaggccguuaggccgaanagugcug

SEQ ID NO: 14297 - RNA, 38 nt, Artificial Sequence
  Description of Artificial Sequence:  Enzymatic Nucleic Acid
  misc_feature (31)..(31): n stands for inosine
augggagacugaugaggccguuaggccgaanccaacag

SEQ ID NO: 14298 - RNA, 38 nt, Artificial Sequence
  Description of Artificial Sequence:  Enzymatic Nucleic Acid
  misc_feature (31)..(31): n stands for inosine
caugggagcugaugaggccguuaggccgaangccaaca

SEQ ID NO: 14299 - RNA, 38 nt, Artificial Sequence
  Description of Artificial Sequence:  Enzymatic Nucleic Acid
  misc_feature (31)..(31): n stands for inosine
agcaugggcugaugaggccguuaggccgaanaggccaa

SEQ ID NO: 14300 - RNA, 38 nt, Artificial Sequence
  Description of Artificial Sequence:  Enzymatic Nucleic Acid
  misc_feature (31)..(31): n stands for inosine
ucagcaugcugaugaggccguuaggccgaanagaggcc

SEQ ID NO: 14301 - RNA, 38 nt, Artificial Sequence
  Description of Artificial Sequence:  Enzymatic Nucleic Acid
  misc_feature (31)..(31): n stands for inosine
uucagcaucugaugaggccguuaggccgaangagaggc

SEQ ID NO: 14302 - RNA, 38 nt, Artificial Sequence
  Description of Artificial Sequence:  Enzymatic Nucleic Acid
  misc_feature (31)..(31): n stands for inosine
cuucagcacugaugaggccguuaggccgaanggagagg

SEQ ID NO: 14303 - RNA, 38 nt, Artificial Sequence
  Description of Artificial Sequence:  Enzymatic Nucleic Acid
  misc_feature (31)..(31): n stands for inosine
agcgcuuccugaugaggccguuaggccgaancauggga

SEQ ID NO: 14304 - RNA, 38 nt, Artificial Sequence
  Description of Artificial Sequence:  Enzymatic Nucleic Acid
  misc_feature (31)..(31): n stands for inosine
ccaggugacugaugaggccguuaggccgaancgcuuca

SEQ ID NO: 14305 - RNA, 38 nt, Artificial Sequence
  Description of Artificial Sequence:  Enzymatic Nucleic Acid
  misc_feature (31)..(31): n stands for inosine
aguccaggcugaugaggccguuaggccgaanaagcgcu

SEQ ID NO: 14306 - RNA, 38 nt, Artificial Sequence
  Description of Artificial Sequence:  Enzymatic Nucleic Acid
  misc_feature (31)..(31): n stands for inosine
ucaguccacugaugaggccguuaggccgaanugaagcg

SEQ ID NO: 14307 - RNA, 38 nt, Artificial Sequence
  Description of Artificial Sequence:  Enzymatic Nucleic Acid
  misc_feature (31)..(31): n stands for inosine
gucagucccugaugaggccguuaggccgaangugaagc

SEQ ID NO: 14308 - RNA, 38 nt, Artificial Sequence
  Description of Artificial Sequence:  Enzymatic Nucleic Acid
  misc_feature (31)..(31): n stands for inosine
uugcuguccugaugaggccguuaggccgaanuccaggu

SEQ ID NO: 14309 - RNA, 38 nt, Artificial Sequence
  Description of Artificial Sequence:  Enzymatic Nucleic Acid
  misc_feature (31)..(31): n stands for inosine
ggguuugccugaugaggccguuaggccgaanucagucc

SEQ ID NO: 14310 - RNA, 38 nt, Artificial Sequence
  Description of Artificial Sequence:  Enzymatic Nucleic Acid
  misc_feature (31)..(31): n stands for inosine
cuuggguucugaugaggccguuaggccgaancugucag

SEQ ID NO: 14311 - RNA, 38 nt, Artificial Sequence
  Description of Artificial Sequence:  Enzymatic Nucleic Acid
  misc_feature (31)..(31): n stands for inosine
aggccuugcugaugaggccguuaggccgaanuuugcug

SEQ ID NO: 14312 - RNA, 38 nt, Artificial Sequence
  Description of Artificial Sequence:  Enzymatic Nucleic Acid
  misc_feature (31)..(31): n stands for inosine
gaggccuucugaugaggccguuaggccgaanguuugcu

SEQ ID NO: 14313 - RNA, 38 nt, Artificial Sequence
  Description of Artificial Sequence:  Enzymatic Nucleic Acid
  misc_feature (31)..(31): n stands for inosine
cgaggccucugaugaggccguuaggccgaangguuugc

SEQ ID NO: 14314 - RNA, 38 nt, Artificial Sequence
  Description of Artificial Sequence:  Enzymatic Nucleic Acid
  misc_feature (31)..(31): n stands for inosine
uugagcgacugaugaggccguuaggccgaanccuuggg

SEQ ID NO: 14315 - RNA, 38 nt, Artificial Sequence
  Description of Artificial Sequence:  Enzymatic Nucleic Acid
  misc_feature (31)..(31): n stands for inosine
cuugagcgcugaugaggccguuaggccgaangccuugg

SEQ ID NO: 14316 - RNA, 38 nt, Artificial Sequence
  Description of Artificial Sequence:  Enzymatic Nucleic Acid
  misc_feature (31)..(31): n stands for inosine
caaucuugcugaugaggccguuaggccgaancgaggcc

SEQ ID NO: 14317 - RNA, 38 nt, Artificial Sequence
  Description of Artificial Sequence:  Enzymatic Nucleic Acid
  misc_feature (31)..(31): n stands for inosine
gucaaucucugaugaggccguuaggccgaanagcgagg

SEQ ID NO: 14318 - RNA, 38 nt, Artificial Sequence
  Description of Artificial Sequence:  Enzymatic Nucleic Acid
  misc_feature (31)..(31): n stands for inosine
uacucucacugaugaggccguuaggccgaanucaaucu

SEQ ID NO: 14319 - RNA, 38 nt, Artificial Sequence
  Description of Artificial Sequence:  Enzymatic Nucleic Acid
  misc_feature (31)..(31): n stands for inosine
cuuuuacucugaugaggccguuaggccgaanuuacucu

SEQ ID NO: 14320 - RNA, 38 nt, Artificial Sequence
  Description of Artificial Sequence:  Enzymatic Nucleic Acid
  misc_feature (31)..(31): n stands for inosine
acuuuuaccugaugaggccguuaggccgaanguuacuc

SEQ ID NO: 14321 - RNA, 38 nt, Artificial Sequence
  Description of Artificial Sequence:  Enzymatic Nucleic Acid
  misc_feature (31)..(31): n stands for inosine
caucagaccugaugaggccguuaggccgaanccccgac

SEQ ID NO: 14322 - RNA, 38 nt, Artificial Sequence
  Description of Artificial Sequence:  Enzymatic Nucleic Acid
  misc_feature (31)..(31): n stands for inosine
cugacauccugaugaggccguuaggccgaanacagccc

SEQ ID NO: 14323 - RNA, 38 nt, Artificial Sequence
  Description of Artificial Sequence:  Enzymatic Nucleic Acid
  misc_feature (31)..(31): n stands for inosine
gggccugccugaugaggccguuaggccgaanacaucag

SEQ ID NO: 14324 - RNA, 38 nt, Artificial Sequence
  Description of Artificial Sequence:  Enzymatic Nucleic Acid
  misc_feature (31)..(31): n stands for inosine
acugggcccugaugaggccguuaggccgaancugacau

SEQ ID NO: 14325 - RNA, 38 nt, Artificial Sequence
  Description of Artificial Sequence:  Enzymatic Nucleic Acid
  misc_feature (31)..(31): n stands for inosine
agaaacugcugaugaggccguuaggccgaanccugcug

SEQ ID NO: 14326 - RNA, 38 nt, Artificial Sequence
  Description of Artificial Sequence:  Enzymatic Nucleic Acid
  misc_feature (31)..(31): n stands for inosine
cagaaacucugaugaggccguuaggccgaangccugcu

SEQ ID NO: 14327 - RNA, 38 nt, Artificial Sequence
  Description of Artificial Sequence:  Enzymatic Nucleic Acid
  misc_feature (31)..(31): n stands for inosine
gcagaaaccugaugaggccguuaggccgaanggccugc

SEQ ID NO: 14328 - RNA, 38 nt, Artificial Sequence
  Description of Artificial Sequence:  Enzymatic Nucleic Acid
  misc_feature (31)..(31): n stands for inosine
ggaauggccugaugaggccguuaggccgaanaaacugg

SEQ ID NO: 14329 - RNA, 38 nt, Artificial Sequence
  Description of Artificial Sequence:  Enzymatic Nucleic Acid
  misc_feature (31)..(31): n stands for inosine
gcuggaaucugaugaggccguuaggccgaancagaaac

SEQ ID NO: 14330 - RNA, 38 nt, Artificial Sequence
  Description of Artificial Sequence:  Enzymatic Nucleic Acid
  misc_feature (31)..(31): n stands for inosine
agcuggaacugaugaggccguuaggccgaangcagaaa

SEQ ID NO: 14331 - RNA, 38 nt, Artificial Sequence
  Description of Artificial Sequence:  Enzymatic Nucleic Acid
  misc_feature (31)..(31): n stands for inosine
ccacagcucugaugaggccguuaggccgaanaauggca

SEQ ID NO: 14332 - RNA, 38 nt, Artificial Sequence
  Description of Artificial Sequence:  Enzymatic Nucleic Acid
  misc_feature (31)..(31): n stands for inosine
cccacagccugaugaggccguuaggccgaangaauggc

SEQ ID NO: 14333 - RNA, 38 nt, Artificial Sequence
  Description of Artificial Sequence:  Enzymatic Nucleic Acid
  misc_feature (31)..(31): n stands for inosine
gugcccaccugaugaggccguuaggccgaancuggaau

SEQ ID NO: 14334 - RNA, 38 nt, Artificial Sequence
  Description of Artificial Sequence:  Enzymatic Nucleic Acid
  misc_feature (31)..(31): n stands for inosine
cgcugacgcugaugaggccguuaggccgaancccacag

SEQ ID NO: 14335 - RNA, 38 nt, Artificial Sequence
  Description of Artificial Sequence:  Enzymatic Nucleic Acid
  misc_feature (31)..(31): n stands for inosine
gccuucgccugaugaggccguuaggccgaanacgugcc

SEQ ID NO: 14336 - RNA, 38 nt, Artificial Sequence
  Description of Artificial Sequence:  Enzymatic Nucleic Acid
  misc_feature (31)..(31): n stands for inosine
ccugcgcucugaugaggccguuaggccgaanccuucgc

SEQ ID NO: 14337 - RNA, 38 nt, Artificial Sequence
  Description of Artificial Sequence:  Enzymatic Nucleic Acid
  misc_feature (31)..(31): n stands for inosine
ggugaacccugaugaggccguuaggccgaancgcuugc

SEQ ID NO: 14338 - RNA, 38 nt, Artificial Sequence
  Description of Artificial Sequence:  Enzymatic Nucleic Acid
  misc_feature (31)..(31): n stands for inosine
gucguaggcugaugaggccguuaggccgaanaaccugc

SEQ ID NO: 14339 - RNA, 38 nt, Artificial Sequence
  Description of Artificial Sequence:  Enzymatic Nucleic Acid
  misc_feature (31)..(31): n stands for inosine
uggucguacugaugaggccguuaggccgaanugaaccu

SEQ ID NO: 14340 - RNA, 38 nt, Artificial Sequence
  Description of Artificial Sequence:  Enzymatic Nucleic Acid
  misc_feature (31)..(31): n stands for inosine
guggucgucugaugaggccguuaggccgaangugaacc

SEQ ID NO: 14341 - RNA, 38 nt, Artificial Sequence
  Description of Artificial Sequence:  Enzymatic Nucleic Acid
  misc_feature (31)..(31): n stands for inosine
cucagcgucugaugaggccguuaggccgaanucguagg

SEQ ID NO: 14342 - RNA, 38 nt, Artificial Sequence
  Description of Artificial Sequence:  Enzymatic Nucleic Acid
  misc_feature (31)..(31): n stands for inosine
gcucagcgcugaugaggccguuaggccgaangucguag

SEQ ID NO: 14343 - RNA, 38 nt, Artificial Sequence
  Description of Artificial Sequence:  Enzymatic Nucleic Acid
  misc_feature (31)..(31): n stands for inosine
uccagcuccugaugaggccguuaggccgaancgugguc

SEQ ID NO: 14344 - RNA, 38 nt, Artificial Sequence
  Description of Artificial Sequence:  Enzymatic Nucleic Acid
  misc_feature (31)..(31): n stands for inosine
uccuuucccugaugaggccguuaggccgaancucagcg

SEQ ID NO: 14345 - RNA, 38 nt, Artificial Sequence
  Description of Artificial Sequence:  Enzymatic Nucleic Acid
  misc_feature (31)..(31): n stands for inosine
cggggagccugaugaggccguuaggccgaancacgcga

SEQ ID NO: 14346 - RNA, 38 nt, Artificial Sequence
  Description of Artificial Sequence:  Enzymatic Nucleic Acid
  misc_feature (31)..(31): n stands for inosine
gggcggggcugaugaggccguuaggccgaancagcacg

SEQ ID NO: 14347 - RNA, 38 nt, Artificial Sequence
  Description of Artificial Sequence:  Enzymatic Nucleic Acid
  misc_feature (31)..(31): n stands for inosine
gggggcggcugaugaggccguuaggccgaanagcagca

SEQ ID NO: 14348 - RNA, 38 nt, Artificial Sequence
  Description of Artificial Sequence:  Enzymatic Nucleic Acid
  misc_feature (31)..(31): n stands for inosine
ugggggcgcugaugaggccguuaggccgaangagcagc

SEQ ID NO: 14349 - RNA, 38 nt, Artificial Sequence
  Description of Artificial Sequence:  Enzymatic Nucleic Acid
  misc_feature (31)..(31): n stands for inosine
cugggggccugaugaggccguuaggccgaanggagcag

SEQ ID NO: 14350 - RNA, 38 nt, Artificial Sequence
  Description of Artificial Sequence:  Enzymatic Nucleic Acid
  misc_feature (31)..(31): n stands for inosine
agucugggcugaugaggccguuaggccgaancggggag

SEQ ID NO: 14351 - RNA, 38 nt, Artificial Sequence
  Description of Artificial Sequence:  Enzymatic Nucleic Acid
  misc_feature (31)..(31): n stands for inosine
uagucuggcugaugaggccguuaggccgaangcgggga

SEQ ID NO: 14352 - RNA, 38 nt, Artificial Sequence
  Description of Artificial Sequence:  Enzymatic Nucleic Acid
  misc_feature (31)..(31): n stands for inosine
guagucugcugaugaggccguuaggccgaanggcgggg

SEQ ID NO: 14353 - RNA, 38 nt, Artificial Sequence
  Description of Artificial Sequence:  Enzymatic Nucleic Acid
  misc_feature (31)..(31): n stands for inosine
uguagucucugaugaggccguuaggccgaangggcggg

SEQ ID NO: 14354 - RNA, 38 nt, Artificial Sequence
  Description of Artificial Sequence:  Enzymatic Nucleic Acid
  misc_feature (31)..(31): n stands for inosine
uuguaguccugaugaggccguuaggccgaanggggcgg

SEQ ID NO: 14355 - RNA, 38 nt, Artificial Sequence
  Description of Artificial Sequence:  Enzymatic Nucleic Acid
  misc_feature (31)..(31): n stands for inosine
cgaguugucugaugaggccguuaggccgaanucugggg

SEQ ID NO: 14356 - RNA, 38 nt, Artificial Sequence
  Description of Artificial Sequence:  Enzymatic Nucleic Acid
  misc_feature (31)..(31): n stands for inosine
caccgagucugaugaggccguuaggccgaanuagucug

SEQ ID NO: 14357 - RNA, 38 nt, Artificial Sequence
  Description of Artificial Sequence:  Enzymatic Nucleic Acid
  misc_feature (31)..(31): n stands for inosine
gaccaccgcugaugaggccguuaggccgaanuuguagu

SEQ ID NO: 14358 - RNA, 38 nt, Artificial Sequence
  Description of Artificial Sequence:  Enzymatic Nucleic Acid
  misc_feature (31)..(31): n stands for inosine
ggaguacacugaugaggccguuaggccgaanaccaccg

SEQ ID NO: 14359 - RNA, 38 nt, Artificial Sequence
  Description of Artificial Sequence:  Enzymatic Nucleic Acid
  misc_feature (31)..(31): n stands for inosine
uggaguaccugaugaggccguuaggccgaangaccacc

SEQ ID NO: 14360 - RNA, 38 nt, Artificial Sequence
  Description of Artificial Sequence:  Enzymatic Nucleic Acid
  misc_feature (31)..(31): n stands for inosine
ugggguggcugaugaggccguuaggccgaanuacagga

SEQ ID NO: 14361 - RNA, 38 nt, Artificial Sequence
  Description of Artificial Sequence:  Enzymatic Nucleic Acid
  misc_feature (31)..(31): n stands for inosine
gguggggucugaugaggccguuaggccgaanaguacag

SEQ ID NO: 14362 - RNA, 38 nt, Artificial Sequence
  Description of Artificial Sequence:  Enzymatic Nucleic Acid
  misc_feature (31)..(31): n stands for inosine
ggguggggcugaugaggccguuaggccgaangaguaca

SEQ ID NO: 14363 - RNA, 38 nt, Artificial Sequence
  Description of Artificial Sequence:  Enzymatic Nucleic Acid
  misc_feature (31)..(31): n stands for inosine
auggguggcugaugaggccguuaggccgaanuggagua

SEQ ID NO: 14364 - RNA, 38 nt, Artificial Sequence
  Description of Artificial Sequence:  Enzymatic Nucleic Acid
  misc_feature (31)..(31): n stands for inosine
gaugggugcugaugaggccguuaggccgaanguggagu

SEQ ID NO: 14365 - RNA, 38 nt, Artificial Sequence
  Description of Artificial Sequence:  Enzymatic Nucleic Acid
  misc_feature (31)..(31): n stands for inosine
agaugggucugaugaggccguuaggccgaangguggag

SEQ ID NO: 14366 - RNA, 38 nt, Artificial Sequence
  Description of Artificial Sequence:  Enzymatic Nucleic Acid
  misc_feature (31)..(31): n stands for inosine
uagaugggcugaugaggccguuaggccgaangggugga

SEQ ID NO: 14367 - RNA, 38 nt, Artificial Sequence
  Description of Artificial Sequence:  Enzymatic Nucleic Acid
  misc_feature (31)..(31): n stands for inosine
ucuagaugcugaugaggccguuaggccgaanuggggug

SEQ ID NO: 14368 - RNA, 38 nt, Artificial Sequence
  Description of Artificial Sequence:  Enzymatic Nucleic Acid
  misc_feature (31)..(31): n stands for inosine
cucuagaucugaugaggccguuaggccgaanguggggu

SEQ ID NO: 14369 - RNA, 38 nt, Artificial Sequence
  Description of Artificial Sequence:  Enzymatic Nucleic Acid
  misc_feature (31)..(31): n stands for inosine
acucuagacugaugaggccguuaggccgaanggugggg

SEQ ID NO: 14370 - RNA, 38 nt, Artificial Sequence
  Description of Artificial Sequence:  Enzymatic Nucleic Acid
  misc_feature (31)..(31): n stands for inosine
caaacucucugaugaggccguuaggccgaanaugggug

SEQ ID NO: 14371 - RNA, 38 nt, Artificial Sequence
  Description of Artificial Sequence:  Enzymatic Nucleic Acid
  misc_feature (31)..(31): n stands for inosine
aggcuucgcugaugaggccguuaggccgaanucaaacu

SEQ ID NO: 14372 - RNA, 38 nt, Artificial Sequence
  Description of Artificial Sequence:  Enzymatic Nucleic Acid
  misc_feature (31)..(31): n stands for inosine
agaaauaacugaugaggccguuaggccgaancuucgug

SEQ ID NO: 14373 - RNA, 38 nt, Artificial Sequence
  Description of Artificial Sequence:  Enzymatic Nucleic Acid
  misc_feature (31)..(31): n stands for inosine
uagaaauacugaugaggccguuaggccgaangcuucgu

SEQ ID NO: 14374 - RNA, 38 nt, Artificial Sequence
  Description of Artificial Sequence:  Enzymatic Nucleic Acid
  misc_feature (31)..(31): n stands for inosine
gugcuucucugaugaggccguuaggccgaanaaauaag

SEQ ID NO: 14375 - RNA, 38 nt, Artificial Sequence
  Description of Artificial Sequence:  Enzymatic Nucleic Acid
  misc_feature (31)..(31): n stands for inosine
uacacaugcugaugaggccguuaggccgaancuucuag

SEQ ID NO: 14376 - RNA, 38 nt, Artificial Sequence
  Description of Artificial Sequence:  Enzymatic Nucleic Acid
  misc_feature (31)..(31): n stands for inosine
aauacacacugaugaggccguuaggccgaanugcuucu

SEQ ID NO: 14377 - RNA, 38 nt, Artificial Sequence
  Description of Artificial Sequence:  Enzymatic Nucleic Acid
  misc_feature (31)..(31): n stands for inosine
uuccugggcugaugaggccguuaggccgaanuauaaau

SEQ ID NO: 14378 - RNA, 38 nt, Artificial Sequence
  Description of Artificial Sequence:  Enzymatic Nucleic Acid
  misc_feature (31)..(31): n stands for inosine
uuuccuggcugaugaggccguuaggccgaanguauaaa

SEQ ID NO: 14379 - RNA, 38 nt, Artificial Sequence
  Description of Artificial Sequence:  Enzymatic Nucleic Acid
  misc_feature (31)..(31): n stands for inosine
guuuccugcugaugaggccguuaggccgaangguauaa

SEQ ID NO: 14380 - RNA, 38 nt, Artificial Sequence
  Description of Artificial Sequence:  Enzymatic Nucleic Acid
  misc_feature (31)..(31): n stands for inosine
aguuuccucugaugaggccguuaggccgaanggguaua

SEQ ID NO: 14381 - RNA, 38 nt, Artificial Sequence
  Description of Artificial Sequence:  Enzymatic Nucleic Acid
  misc_feature (31)..(31): n stands for inosine
uaguuucccugaugaggccguuaggccgaangggguau

SEQ ID NO: 14382 - RNA, 38 nt, Artificial Sequence
  Description of Artificial Sequence:  Enzymatic Nucleic Acid
  misc_feature (31)..(31): n stands for inosine
caaaagcucugaugaggccguuaggccgaanuuuccug

SEQ ID NO: 14383 - RNA, 38 nt, Artificial Sequence
  Description of Artificial Sequence:  Enzymatic Nucleic Acid
  misc_feature (31)..(31): n stands for inosine
cuggcaaacugaugaggccguuaggccgaancuaguuu

SEQ ID NO: 14384 - RNA, 38 nt, Artificial Sequence
  Description of Artificial Sequence:  Enzymatic Nucleic Acid
  misc_feature (31)..(31): n stands for inosine
auaauacucugaugaggccguuaggccgaancaaaagc

SEQ ID NO: 14385 - RNA, 38 nt, Artificial Sequence
  Description of Artificial Sequence:  Enzymatic Nucleic Acid
  misc_feature (31)..(31): n stands for inosine
cauaauaccugaugaggccguuaggccgaangcaaaag

SEQ ID NO: 14386 - RNA, 38 nt, Artificial Sequence
  Description of Artificial Sequence:  Enzymatic Nucleic Acid
  misc_feature (31)..(31): n stands for inosine
cuuauauacugaugaggccguuaggccgaancauaaua

SEQ ID NO: 14387 - RNA, 38 nt, Artificial Sequence
  Description of Artificial Sequence:  Enzymatic Nucleic Acid
  misc_feature (31)..(31): n stands for inosine
gauaaaggcugaugaggccguuaggccgaanuaaacuu

SEQ ID NO: 14388 - RNA, 38 nt, Artificial Sequence
  Description of Artificial Sequence:  Enzymatic Nucleic Acid
  misc_feature (31)..(31): n stands for inosine
aagauaaacugaugaggccguuaggccgaanuguaaac

SEQ ID NO: 14389 - RNA, 38 nt, Artificial Sequence
  Description of Artificial Sequence:  Enzymatic Nucleic Acid
  misc_feature (31)..(31): n stands for inosine
aaagauaacugaugaggccguuaggccgaanguguaaa

SEQ ID NO: 14390 - RNA, 38 nt, Artificial Sequence
  Description of Artificial Sequence:  Enzymatic Nucleic Acid
  misc_feature (31)..(31): n stands for inosine
ccauggaacugaugaggccguuaggccgaanauaaagg

SEQ ID NO: 14391 - RNA, 38 nt, Artificial Sequence
  Description of Artificial Sequence:  Enzymatic Nucleic Acid
  misc_feature (31)..(31): n stands for inosine
gcucccaucugaugaggccguuaggccgaanaaagaua

SEQ ID NO: 14392 - RNA, 38 nt, Artificial Sequence
  Description of Artificial Sequence:  Enzymatic Nucleic Acid
  misc_feature (31)..(31): n stands for inosine
ggcucccacugaugaggccguuaggccgaangaaagau

SEQ ID NO: 14393 - RNA, 38 nt, Artificial Sequence
  Description of Artificial Sequence:  Enzymatic Nucleic Acid
  misc_feature (31)..(31): n stands for inosine
aagcagcucugaugaggccguuaggccgaancucccau

SEQ ID NO: 14394 - RNA, 38 nt, Artificial Sequence
  Description of Artificial Sequence:  Enzymatic Nucleic Acid
  misc_feature (31)..(31): n stands for inosine
aaagcagccugaugaggccguuaggccgaangcuccca

SEQ ID NO: 14395 - RNA, 38 nt, Artificial Sequence
  Description of Artificial Sequence:  Enzymatic Nucleic Acid
  misc_feature (31)..(31): n stands for inosine
caaaaagccugaugaggccguuaggccgaancuggcuc

SEQ ID NO: 14396 - RNA, 38 nt, Artificial Sequence
  Description of Artificial Sequence:  Enzymatic Nucleic Acid
  misc_feature (31)..(31): n stands for inosine
ucacaaaacugaugaggccguuaggccgaancagcugg

SEQ ID NO: 14397 - RNA, 38 nt, Artificial Sequence
  Description of Artificial Sequence:  Enzymatic Nucleic Acid
  misc_feature (31)..(31): n stands for inosine
aaaaaaaacugaugaggccguuaggccgaancacuauu

SEQ ID NO: 14398 - RNA, 38 nt, Artificial Sequence
  Description of Artificial Sequence:  Enzymatic Nucleic Acid
  misc_feature (31)..(31): n stands for inosine
uucuuguucugaugaggccguuaggccgaanucaaaaa

SEQ ID NO: 14399 - RNA, 38 nt, Artificial Sequence
  Description of Artificial Sequence:  Enzymatic Nucleic Acid
  misc_feature (31)..(31): n stands for inosine
uacauucucugaugaggccguuaggccgaanuuaguca

SEQ ID NO: 14400 - RNA, 38 nt, Artificial Sequence
  Description of Artificial Sequence:  Enzymatic Nucleic Acid
  misc_feature (31)..(31): n stands for inosine
cuaucuggcugaugaggccguuaggccgaanuuacauu

SEQ ID NO: 14401 - RNA, 38 nt, Artificial Sequence
  Description of Artificial Sequence:  Enzymatic Nucleic Acid
  misc_feature (31)..(31): n stands for inosine
cucuaucucugaugaggccguuaggccgaanaguuaca

SEQ ID NO: 14402 - RNA, 38 nt, Artificial Sequence
  Description of Artificial Sequence:  Enzymatic Nucleic Acid
  misc_feature (31)..(31): n stands for inosine
ucucuauccugaugaggccguuaggccgaangaguuac

SEQ ID NO: 14403 - RNA, 38 nt, Artificial Sequence
  Description of Artificial Sequence:  Enzymatic Nucleic Acid
  misc_feature (31)..(31): n stands for inosine
ucuucacucugaugaggccguuaggccgaanucacuau

SEQ ID NO: 14404 - RNA, 38 nt, Artificial Sequence
  Description of Artificial Sequence:  Enzymatic Nucleic Acid
  misc_feature (31)..(31): n stands for inosine
agcaguagcugaugaggccguuaggccgaanuucuuca

SEQ ID NO: 14405 - RNA, 38 nt, Artificial Sequence
  Description of Artificial Sequence:  Enzymatic Nucleic Acid
  misc_feature (31)..(31): n stands for inosine
uuagcagucugaugaggccguuaggccgaanuguucuu

SEQ ID NO: 14406 - RNA, 38 nt, Artificial Sequence
  Description of Artificial Sequence:  Enzymatic Nucleic Acid
  misc_feature (31)..(31): n stands for inosine
gauuuagccugaugaggccguuaggccgaanuaguguu

SEQ ID NO: 14407 - RNA, 38 nt, Artificial Sequence
  Description of Artificial Sequence:  Enzymatic Nucleic Acid
  misc_feature (31)..(31): n stands for inosine
gaggauuucugaugaggccguuaggccgaancaguagu

SEQ ID NO: 14408 - RNA, 38 nt, Artificial Sequence
  Description of Artificial Sequence:  Enzymatic Nucleic Acid
  misc_feature (31)..(31): n stands for inosine
uaacaugacugaugaggccguuaggccgaanauuuagc

SEQ ID NO: 14409 - RNA, 38 nt, Artificial Sequence
  Description of Artificial Sequence:  Enzymatic Nucleic Acid
  misc_feature (31)..(31): n stands for inosine
guaacaugcugaugaggccguuaggccgaangauuuag

SEQ ID NO: 14410 - RNA, 38 nt, Artificial Sequence
  Description of Artificial Sequence:  Enzymatic Nucleic Acid
  misc_feature (31)..(31): n stands for inosine
gaguaacacugaugaggccguuaggccgaanaggauuu

SEQ ID NO: 14411 - RNA, 38 nt, Artificial Sequence
  Description of Artificial Sequence:  Enzymatic Nucleic Acid
  misc_feature (31)..(31): n stands for inosine
uaacacugcugaugaggccguuaggccgaanuaacaug

SEQ ID NO: 14412 - RNA, 38 nt, Artificial Sequence
  Description of Artificial Sequence:  Enzymatic Nucleic Acid
  misc_feature (31)..(31): n stands for inosine
ucuaacaccugaugaggccguuaggccgaanaguaaca

SEQ ID NO: 14413 - RNA, 38 nt, Artificial Sequence
  Description of Artificial Sequence:  Enzymatic Nucleic Acid
  misc_feature (31)..(31): n stands for inosine
uuuaggaacugaugaggccguuaggccgaanauuucuc

SEQ ID NO: 14414 - RNA, 38 nt, Artificial Sequence
  Description of Artificial Sequence:  Enzymatic Nucleic Acid
  misc_feature (31)..(31): n stands for inosine
guuuaggacugaugaggccguuaggccgaangauuucu

SEQ ID NO: 14415 - RNA, 38 nt, Artificial Sequence
  Description of Artificial Sequence:  Enzymatic Nucleic Acid
  misc_feature (31)..(31): n stands for inosine
uggguuuacugaugaggccguuaggccgaanaaggauu

SEQ ID NO: 14416 - RNA, 38 nt, Artificial Sequence
  Description of Artificial Sequence:  Enzymatic Nucleic Acid
  misc_feature (31)..(31): n stands for inosine
uuggguuucugaugaggccguuaggccgaangaaggau

SEQ ID NO: 14417 - RNA, 38 nt, Artificial Sequence
  Description of Artificial Sequence:  Enzymatic Nucleic Acid
  misc_feature (31)..(31): n stands for inosine
agucauugcugaugaggccguuaggccgaanuuuagga

SEQ ID NO: 14418 - RNA, 38 nt, Artificial Sequence
  Description of Artificial Sequence:  Enzymatic Nucleic Acid
  misc_feature (31)..(31): n stands for inosine
aagucauucugaugaggccguuaggccgaanguuuagg

SEQ ID NO: 14419 - RNA, 38 nt, Artificial Sequence
  Description of Artificial Sequence:  Enzymatic Nucleic Acid
  misc_feature (31)..(31): n stands for inosine
gaagucaucugaugaggccguuaggccgaangguuuag

SEQ ID NO: 14420 - RNA, 38 nt, Artificial Sequence
  Description of Artificial Sequence:  Enzymatic Nucleic Acid
  misc_feature (31)..(31): n stands for inosine
agcagggacugaugaggccguuaggccgaanucauugg

SEQ ID NO: 14421 - RNA, 38 nt, Artificial Sequence
  Description of Artificial Sequence:  Enzymatic Nucleic Acid
  misc_feature (31)..(31): n stands for inosine
uggagcagcugaugaggccguuaggccgaanaagucau

SEQ ID NO: 14422 - RNA, 38 nt, Artificial Sequence
  Description of Artificial Sequence:  Enzymatic Nucleic Acid
  misc_feature (31)..(31): n stands for inosine
uuggagcacugaugaggccguuaggccgaangaaguca

SEQ ID NO: 14423 - RNA, 38 nt, Artificial Sequence
  Description of Artificial Sequence:  Enzymatic Nucleic Acid
  misc_feature (31)..(31): n stands for inosine
guuggagccugaugaggccguuaggccgaanggaaguc

SEQ ID NO: 14424 - RNA, 38 nt, Artificial Sequence
  Description of Artificial Sequence:  Enzymatic Nucleic Acid
  misc_feature (31)..(31): n stands for inosine
gggguuggcugaugaggccguuaggccgaancagggaa

SEQ ID NO: 14425 - RNA, 38 nt, Artificial Sequence
  Description of Artificial Sequence:  Enzymatic Nucleic Acid
  misc_feature (31)..(31): n stands for inosine
cggggguucugaugaggccguuaggccgaanagcaggg

SEQ ID NO: 14426 - RNA, 38 nt, Artificial Sequence
  Description of Artificial Sequence:  Enzymatic Nucleic Acid
  misc_feature (31)..(31): n stands for inosine
gcgggggucugaugaggccguuaggccgaangagcagg

SEQ ID NO: 14427 - RNA, 38 nt, Artificial Sequence
  Description of Artificial Sequence:  Enzymatic Nucleic Acid
  misc_feature (31)..(31): n stands for inosine
guggcgggcugaugaggccguuaggccgaanuuggagc

SEQ ID NO: 14428 - RNA, 38 nt, Artificial Sequence
  Description of Artificial Sequence:  Enzymatic Nucleic Acid
  misc_feature (31)..(31): n stands for inosine
gguggcggcugaugaggccguuaggccgaanguuggag

SEQ ID NO: 14429 - RNA, 38 nt, Artificial Sequence
  Description of Artificial Sequence:  Enzymatic Nucleic Acid
  misc_feature (31)..(31): n stands for inosine
agguggcgcugaugaggccguuaggccgaangguugga

SEQ ID NO: 14430 - RNA, 38 nt, Artificial Sequence
  Description of Artificial Sequence:  Enzymatic Nucleic Acid
  misc_feature (31)..(31): n stands for inosine
gagguggccugaugaggccguuaggccgaanggguugg

SEQ ID NO: 14431 - RNA, 38 nt, Artificial Sequence
  Description of Artificial Sequence:  Enzymatic Nucleic Acid
  misc_feature (31)..(31): n stands for inosine
ccugaggucugaugaggccguuaggccgaancgggggu

SEQ ID NO: 14432 - RNA, 38 nt, Artificial Sequence
  Description of Artificial Sequence:  Enzymatic Nucleic Acid
  misc_feature (31)..(31): n stands for inosine
cccugaggcugaugaggccguuaggccgaangcggggg

SEQ ID NO: 14433 - RNA, 38 nt, Artificial Sequence
  Description of Artificial Sequence:  Enzymatic Nucleic Acid
  misc_feature (31)..(31): n stands for inosine
ugcccugacugaugaggccguuaggccgaanuggcggg

SEQ ID NO: 14434 - RNA, 38 nt, Artificial Sequence
  Description of Artificial Sequence:  Enzymatic Nucleic Acid
  misc_feature (31)..(31): n stands for inosine
gugcccugcugaugaggccguuaggccgaanguggcgg

SEQ ID NO: 14435 - RNA, 38 nt, Artificial Sequence
  Description of Artificial Sequence:  Enzymatic Nucleic Acid
  misc_feature (31)..(31): n stands for inosine
gcgugccccugaugaggccguuaggccgaanagguggc

SEQ ID NO: 14436 - RNA, 38 nt, Artificial Sequence
  Description of Artificial Sequence:  Enzymatic Nucleic Acid
  misc_feature (31)..(31): n stands for inosine
guccugcgcugaugaggccguuaggccgaancccugag

SEQ ID NO: 14437 - RNA, 38 nt, Artificial Sequence
  Description of Artificial Sequence:  Enzymatic Nucleic Acid
  misc_feature (31)..(31): n stands for inosine
acuggucccugaugaggccguuaggccgaancgugccc

SEQ ID NO: 14438 - RNA, 38 nt, Artificial Sequence
  Description of Artificial Sequence:  Enzymatic Nucleic Acid
  misc_feature (31)..(31): n stands for inosine
aucaaacucugaugaggccguuaggccgaanuccugcg

SEQ ID NO: 14439 - RNA, 38 nt, Artificial Sequence
  Description of Artificial Sequence:  Enzymatic Nucleic Acid
  misc_feature (31)..(31): n stands for inosine
aaucaaaccugaugaggccguuaggccgaanguccugc

SEQ ID NO: 14440 - RNA, 38 nt, Artificial Sequence
  Description of Artificial Sequence:  Enzymatic Nucleic Acid
  misc_feature (31)..(31): n stands for inosine
aucagugccugaugaggccguuaggccgaancuccuca

SEQ ID NO: 14441 - RNA, 38 nt, Artificial Sequence
  Description of Artificial Sequence:  Enzymatic Nucleic Acid
  misc_feature (31)..(31): n stands for inosine
gugaucagcugaugaggccguuaggccgaancagcucc

SEQ ID NO: 14442 - RNA, 38 nt, Artificial Sequence
  Description of Artificial Sequence:  Enzymatic Nucleic Acid
  misc_feature (31)..(31): n stands for inosine
gggugauccugaugaggccguuaggccgaanugcagcu

SEQ ID NO: 14443 - RNA, 38 nt, Artificial Sequence
  Description of Artificial Sequence:  Enzymatic Nucleic Acid
  misc_feature (31)..(31): n stands for inosine
gcauugggcugaugaggccguuaggccgaanaucagug

SEQ ID NO: 14444 - RNA, 38 nt, Artificial Sequence
  Description of Artificial Sequence:  Enzymatic Nucleic Acid
  misc_feature (31)..(31): n stands for inosine
augcauugcugaugaggccguuaggccgaanugaucag

SEQ ID NO: 14445 - RNA, 38 nt, Artificial Sequence
  Description of Artificial Sequence:  Enzymatic Nucleic Acid
  misc_feature (31)..(31): n stands for inosine
gaugcauucugaugaggccguuaggccgaangugauca

SEQ ID NO: 14446 - RNA, 38 nt, Artificial Sequence
  Description of Artificial Sequence:  Enzymatic Nucleic Acid
  misc_feature (31)..(31): n stands for inosine
ugaugcaucugaugaggccguuaggccgaanggugauc

SEQ ID NO: 14447 - RNA, 38 nt, Artificial Sequence
  Description of Artificial Sequence:  Enzymatic Nucleic Acid
  misc_feature (31)..(31): n stands for inosine
guacgugacugaugaggccguuaggccgaancauuggg

SEQ ID NO: 14448 - RNA, 38 nt, Artificial Sequence
  Description of Artificial Sequence:  Enzymatic Nucleic Acid
  misc_feature (31)..(31): n stands for inosine
gggguacgcugaugaggccguuaggccgaanaugcauu

SEQ ID NO: 14449 - RNA, 38 nt, Artificial Sequence
  Description of Artificial Sequence:  Enzymatic Nucleic Acid
  misc_feature (31)..(31): n stands for inosine
cccaguggcugaugaggccguuaggccgaanuacguga

SEQ ID NO: 14450 - RNA, 38 nt, Artificial Sequence
  Description of Artificial Sequence:  Enzymatic Nucleic Acid
  misc_feature (31)..(31): n stands for inosine
gcccagugcugaugaggccguuaggccgaanguacgug

SEQ ID NO: 14451 - RNA, 38 nt, Artificial Sequence
  Description of Artificial Sequence:  Enzymatic Nucleic Acid
  misc_feature (31)..(31): n stands for inosine
ggcccagucugaugaggccguuaggccgaangguacgu

SEQ ID NO: 14452 - RNA, 38 nt, Artificial Sequence
  Description of Artificial Sequence:  Enzymatic Nucleic Acid
  misc_feature (31)..(31): n stands for inosine
uggcccagcugaugaggccguuaggccgaanggguacg

SEQ ID NO: 14453 - RNA, 38 nt, Artificial Sequence
  Description of Artificial Sequence:  Enzymatic Nucleic Acid
  misc_feature (31)..(31): n stands for inosine
gcuggccccugaugaggccguuaggccgaanuggggua

SEQ ID NO: 14454 - RNA, 38 nt, Artificial Sequence
  Description of Artificial Sequence:  Enzymatic Nucleic Acid
  misc_feature (31)..(31): n stands for inosine
gcagggcucugaugaggccguuaggccgaancccagug

SEQ ID NO: 14455 - RNA, 38 nt, Artificial Sequence
  Description of Artificial Sequence:  Enzymatic Nucleic Acid
  misc_feature (31)..(31): n stands for inosine
ugcagggccugaugaggccguuaggccgaangcccagu

SEQ ID NO: 14456 - RNA, 38 nt, Artificial Sequence
  Description of Artificial Sequence:  Enzymatic Nucleic Acid
  misc_feature (31)..(31): n stands for inosine
ggcugcagcugaugaggccguuaggccgaancuggccc

SEQ ID NO: 14457 - RNA, 38 nt, Artificial Sequence
  Description of Artificial Sequence:  Enzymatic Nucleic Acid
  misc_feature (31)..(31): n stands for inosine
gggcugcacugaugaggccguuaggccgaangcuggcc

SEQ ID NO: 14458 - RNA, 38 nt, Artificial Sequence
  Description of Artificial Sequence:  Enzymatic Nucleic Acid
  misc_feature (31)..(31): n stands for inosine
ugggcugccugaugaggccguuaggccgaanggcuggc

SEQ ID NO: 14459 - RNA, 38 nt, Artificial Sequence
  Description of Artificial Sequence:  Enzymatic Nucleic Acid
  misc_feature (31)..(31): n stands for inosine
uuuugggccugaugaggccguuaggccgaancagggcu

SEQ ID NO: 14460 - RNA, 38 nt, Artificial Sequence
  Description of Artificial Sequence:  Enzymatic Nucleic Acid
  misc_feature (31)..(31): n stands for inosine
ggguuuugcugaugaggccguuaggccgaancugcagg

SEQ ID NO: 14461 - RNA, 38 nt, Artificial Sequence
  Description of Artificial Sequence:  Enzymatic Nucleic Acid
  misc_feature (31)..(31): n stands for inosine
uggguuuucugaugaggccguuaggccgaangcugcag

SEQ ID NO: 14462 - RNA, 38 nt, Artificial Sequence
  Description of Artificial Sequence:  Enzymatic Nucleic Acid
  misc_feature (31)..(31): n stands for inosine
cuggguuucugaugaggccguuaggccgaanggcugca

SEQ ID NO: 14463 - RNA, 38 nt, Artificial Sequence
  Description of Artificial Sequence:  Enzymatic Nucleic Acid
  misc_feature (31)..(31): n stands for inosine
uugcccugcugaugaggccguuaggccgaanuuuuggg

SEQ ID NO: 14464 - RNA, 38 nt, Artificial Sequence
  Description of Artificial Sequence:  Enzymatic Nucleic Acid
  misc_feature (31)..(31): n stands for inosine
guugcccucugaugaggccguuaggccgaanguuuugg

SEQ ID NO: 14465 - RNA, 38 nt, Artificial Sequence
  Description of Artificial Sequence:  Enzymatic Nucleic Acid
  misc_feature (31)..(31): n stands for inosine
uguugccccugaugaggccguuaggccgaangguuuug

SEQ ID NO: 14466 - RNA, 38 nt, Artificial Sequence
  Description of Artificial Sequence:  Enzymatic Nucleic Acid
  misc_feature (31)..(31): n stands for inosine
gggcuugucugaugaggccguuaggccgaancccuggg

SEQ ID NO: 14467 - RNA, 38 nt, Artificial Sequence
  Description of Artificial Sequence:  Enzymatic Nucleic Acid
  misc_feature (31)..(31): n stands for inosine
aacgggcucugaugaggccguuaggccgaanuugcccu

SEQ ID NO: 14468 - RNA, 38 nt, Artificial Sequence
  Description of Artificial Sequence:  Enzymatic Nucleic Acid
  misc_feature (31)..(31): n stands for inosine
ggcuaacgcugaugaggccguuaggccgaancuuguug

SEQ ID NO: 14469 - RNA, 38 nt, Artificial Sequence
  Description of Artificial Sequence:  Enzymatic Nucleic Acid
  misc_feature (31)..(31): n stands for inosine
gggcuaaccugaugaggccguuaggccgaangcuuguu

SEQ ID NO: 14470 - RNA, 38 nt, Artificial Sequence
  Description of Artificial Sequence:  Enzymatic Nucleic Acid
  misc_feature (31)..(31): n stands for inosine
uccccuggcugaugaggccguuaggccgaancuaacgg

SEQ ID NO: 14471 - RNA, 38 nt, Artificial Sequence
  Description of Artificial Sequence:  Enzymatic Nucleic Acid
  misc_feature (31)..(31): n stands for inosine
auccccugcugaugaggccguuaggccgaangcuaacg

SEQ ID NO: 14472 - RNA, 38 nt, Artificial Sequence
  Description of Artificial Sequence:  Enzymatic Nucleic Acid
  misc_feature (31)..(31): n stands for inosine
gauccccucugaugaggccguuaggccgaanggcuaac

SEQ ID NO: 14473 - RNA, 38 nt, Artificial Sequence
  Description of Artificial Sequence:  Enzymatic Nucleic Acid
  misc_feature (31)..(31): n stands for inosine
ugaucccccugaugaggccguuaggccgaangggcuaa

SEQ ID NO: 14474 - RNA, 38 nt, Artificial Sequence
  Description of Artificial Sequence:  Enzymatic Nucleic Acid
  misc_feature (31)..(31): n stands for inosine
ccagccagcugaugaggccguuaggccgaanauccccu

SEQ ID NO: 14475 - RNA, 38 nt, Artificial Sequence
  Description of Artificial Sequence:  Enzymatic Nucleic Acid
  misc_feature (31)..(31): n stands for inosine
ggccagcccugaugaggccguuaggccgaanugauccc

SEQ ID NO: 14476 - RNA, 38 nt, Artificial Sequence
  Description of Artificial Sequence:  Enzymatic Nucleic Acid
  misc_feature (31)..(31): n stands for inosine
cucaggcccugaugaggccguuaggccgaanccaguga

SEQ ID NO: 14477 - RNA, 38 nt, Artificial Sequence
  Description of Artificial Sequence:  Enzymatic Nucleic Acid
  misc_feature (31)..(31): n stands for inosine
guugcucacugaugaggccguuaggccgaanccagcca

SEQ ID NO: 14478 - RNA, 38 nt, Artificial Sequence
  Description of Artificial Sequence:  Enzymatic Nucleic Acid
  misc_feature (31)..(31): n stands for inosine
uguugcuccugaugaggccguuaggccgaangccagcc

SEQ ID NO: 14479 - RNA, 38 nt, Artificial Sequence
  Description of Artificial Sequence:  Enzymatic Nucleic Acid
  misc_feature (31)..(31): n stands for inosine
cgagaugucugaugaggccguuaggccgaancucaggc

SEQ ID NO: 14480 - RNA, 38 nt, Artificial Sequence
  Description of Artificial Sequence:  Enzymatic Nucleic Acid
  misc_feature (31)..(31): n stands for inosine
ucccgagacugaugaggccguuaggccgaanuugcuca

SEQ ID NO: 14481 - RNA, 38 nt, Artificial Sequence
  Description of Artificial Sequence:  Enzymatic Nucleic Acid
  misc_feature (31)..(31): n stands for inosine
gacucccgcugaugaggccguuaggccgaanauguugc

SEQ ID NO: 14482 - RNA, 38 nt, Artificial Sequence
  Description of Artificial Sequence:  Enzymatic Nucleic Acid
  misc_feature (31)..(31): n stands for inosine
cugcuagacugaugaggccguuaggccgaanacucccg

SEQ ID NO: 14483 - RNA, 38 nt, Artificial Sequence
  Description of Artificial Sequence:  Enzymatic Nucleic Acid
  misc_feature (31)..(31): n stands for inosine
ccugcuagcugaugaggccguuaggccgaangacuccc

SEQ ID NO: 14484 - RNA, 38 nt, Artificial Sequence
  Description of Artificial Sequence:  Enzymatic Nucleic Acid
  misc_feature (31)..(31): n stands for inosine
ggccugcucugaugaggccguuaggccgaanaggacuc

SEQ ID NO: 14485 - RNA, 38 nt, Artificial Sequence
  Description of Artificial Sequence:  Enzymatic Nucleic Acid
  misc_feature (31)..(31): n stands for inosine
cuuaggcccugaugaggccguuaggccgaancuagagg

SEQ ID NO: 14486 - RNA, 38 nt, Artificial Sequence
  Description of Artificial Sequence:  Enzymatic Nucleic Acid
  misc_feature (31)..(31): n stands for inosine
augucuuacugaugaggccguuaggccgaanccugcua

SEQ ID NO: 14487 - RNA, 38 nt, Artificial Sequence
  Description of Artificial Sequence:  Enzymatic Nucleic Acid
  misc_feature (31)..(31): n stands for inosine
caugucuucugaugaggccguuaggccgaangccugcu

SEQ ID NO: 14488 - RNA, 38 nt, Artificial Sequence
  Description of Artificial Sequence:  Enzymatic Nucleic Acid
  misc_feature (31)..(31): n stands for inosine
uccucacacugaugaggccguuaggccgaanucuuagg

SEQ ID NO: 14489 - RNA, 38 nt, Artificial Sequence
  Description of Artificial Sequence:  Enzymatic Nucleic Acid
  misc_feature (31)..(31): n stands for inosine
uugcuuuucugaugaggccguuaggccgaancuuuuuu

SEQ ID NO: 14490 - RNA, 38 nt, Artificial Sequence
  Description of Artificial Sequence:  Enzymatic Nucleic Acid
  misc_feature (31)..(31): n stands for inosine
uucucccucugaugaggccguuaggccgaancuuuuug

SEQ ID NO: 14491 - RNA, 38 nt, Artificial Sequence
  Description of Artificial Sequence:  Enzymatic Nucleic Acid
  misc_feature (31)..(31): n stands for inosine
cuucuccccugaugaggccguuaggccgaanuuucucu

SEQ ID NO: 14492 - RNA, 38 nt, Artificial Sequence
  Description of Artificial Sequence:  Enzymatic Nucleic Acid
  misc_feature (31)..(31): n stands for inosine
cuuucucacugaugaggccguuaggccgaanccuucuc

SEQ ID NO: 14493 - RNA, 38 nt, Artificial Sequence
  Description of Artificial Sequence:  Enzymatic Nucleic Acid
  misc_feature (31)..(31): n stands for inosine
ccacauggcugaugaggccguuaggccgaancgucuca

SEQ ID NO: 14494 - RNA, 38 nt, Artificial Sequence
  Description of Artificial Sequence:  Enzymatic Nucleic Acid
  misc_feature (31)..(31): n stands for inosine
gcccacaucugaugaggccguuaggccgaanugcgucu

SEQ ID NO: 14495 - RNA, 38 nt, Artificial Sequence
  Description of Artificial Sequence:  Enzymatic Nucleic Acid
  misc_feature (31)..(31): n stands for inosine
ugcccacacugaugaggccguuaggccgaangugcguc

SEQ ID NO: 14496 - RNA, 38 nt, Artificial Sequence
  Description of Artificial Sequence:  Enzymatic Nucleic Acid
  misc_feature (31)..(31): n stands for inosine
ccccuccgcugaugaggccguuaggccgaancccacau

SEQ ID NO: 14497 - RNA, 38 nt, Artificial Sequence
  Description of Artificial Sequence:  Enzymatic Nucleic Acid
  misc_feature (31)..(31): n stands for inosine
cauugcugcugaugaggccguuaggccgaanccccguc

SEQ ID NO: 14498 - RNA, 38 nt, Artificial Sequence
  Description of Artificial Sequence:  Enzymatic Nucleic Acid
  misc_feature (31)..(31): n stands for inosine
ggcauugccugaugaggccguuaggccgaanagccccg

SEQ ID NO: 14499 - RNA, 38 nt, Artificial Sequence
  Description of Artificial Sequence:  Enzymatic Nucleic Acid
  misc_feature (31)..(31): n stands for inosine
aauggcaucugaugaggccguuaggccgaancugagcc

SEQ ID NO: 14500 - RNA, 38 nt, Artificial Sequence
  Description of Artificial Sequence:  Enzymatic Nucleic Acid
  misc_feature (31)..(31): n stands for inosine
acugaaaucugaugaggccguuaggccgaancauugcu

SEQ ID NO: 14501 - RNA, 38 nt, Artificial Sequence
  Description of Artificial Sequence:  Enzymatic Nucleic Acid
  misc_feature (31)..(31): n stands for inosine
cacugaaacugaugaggccguuaggccgaangcauugc

SEQ ID NO: 14502 - RNA, 38 nt, Artificial Sequence
  Description of Artificial Sequence:  Enzymatic Nucleic Acid
  misc_feature (31)..(31): n stands for inosine
gaagccaccugaugaggccguuaggccgaanaaauggc

SEQ ID NO: 14503 - RNA, 38 nt, Artificial Sequence
  Description of Artificial Sequence:  Enzymatic Nucleic Acid
  misc_feature (31)..(31): n stands for inosine
agcugggacugaugaggccguuaggccgaanccacuga

SEQ ID NO: 14504 - RNA, 38 nt, Artificial Sequence
  Description of Artificial Sequence:  Enzymatic Nucleic Acid
  misc_feature (31)..(31): n stands for inosine
cagagcugcugaugaggccguuaggccgaanaagccac

SEQ ID NO: 14505 - RNA, 38 nt, Artificial Sequence
  Description of Artificial Sequence:  Enzymatic Nucleic Acid
  misc_feature (31)..(31): n stands for inosine
ucagagcucugaugaggccguuaggccgaangaagcca

SEQ ID NO: 14506 - RNA, 38 nt, Artificial Sequence
  Description of Artificial Sequence:  Enzymatic Nucleic Acid
  misc_feature (31)..(31): n stands for inosine
gucagagccugaugaggccguuaggccgaanggaagcc

SEQ ID NO: 14507 - RNA, 38 nt, Artificial Sequence
  Description of Artificial Sequence:  Enzymatic Nucleic Acid
  misc_feature (31)..(31): n stands for inosine
agggucagcugaugaggccguuaggccgaancugggaa

SEQ ID NO: 14508 - RNA, 38 nt, Artificial Sequence
  Description of Artificial Sequence:  Enzymatic Nucleic Acid
  misc_feature (31)..(31): n stands for inosine
gaaggguccugaugaggccguuaggccgaanagcuggg

SEQ ID NO: 14509 - RNA, 38 nt, Artificial Sequence
  Description of Artificial Sequence:  Enzymatic Nucleic Acid
  misc_feature (31)..(31): n stands for inosine
uguagaagcugaugaggccguuaggccgaanucagagc

SEQ ID NO: 14510 - RNA, 38 nt, Artificial Sequence
  Description of Artificial Sequence:  Enzymatic Nucleic Acid
  misc_feature (31)..(31): n stands for inosine
auguagaacugaugaggccguuaggccgaangucagag

SEQ ID NO: 14511 - RNA, 38 nt, Artificial Sequence
  Description of Artificial Sequence:  Enzymatic Nucleic Acid
  misc_feature (31)..(31): n stands for inosine
aauguagacugaugaggccguuaggccgaanggucaga

SEQ ID NO: 14512 - RNA, 38 nt, Artificial Sequence
  Description of Artificial Sequence:  Enzymatic Nucleic Acid
  misc_feature (31)..(31): n stands for inosine
ucaaaugucugaugaggccguuaggccgaanaaggguc

SEQ ID NO: 14513 - RNA, 38 nt, Artificial Sequence
  Description of Artificial Sequence:  Enzymatic Nucleic Acid
  misc_feature (31)..(31): n stands for inosine
cccucaaacugaugaggccguuaggccgaanuagaagg

SEQ ID NO: 14514 - RNA, 38 nt, Artificial Sequence
  Description of Artificial Sequence:  Enzymatic Nucleic Acid
  misc_feature (31)..(31): n stands for inosine
ccuggcugcugaugaggccguuaggccgaancccucaa

SEQ ID NO: 14515 - RNA, 38 nt, Artificial Sequence
  Description of Artificial Sequence:  Enzymatic Nucleic Acid
  misc_feature (31)..(31): n stands for inosine
uccuggcucugaugaggccguuaggccgaangcccuca

SEQ ID NO: 14516 - RNA, 38 nt, Artificial Sequence
  Description of Artificial Sequence:  Enzymatic Nucleic Acid
  misc_feature (31)..(31): n stands for inosine
cuccuggccugaugaggccguuaggccgaanggcccuc

SEQ ID NO: 14517 - RNA, 38 nt, Artificial Sequence
  Description of Artificial Sequence:  Enzymatic Nucleic Acid
  misc_feature (31)..(31): n stands for inosine
cugcuccucugaugaggccguuaggccgaancugggcc

SEQ ID NO: 14518 - RNA, 38 nt, Artificial Sequence
  Description of Artificial Sequence:  Enzymatic Nucleic Acid
  misc_feature (31)..(31): n stands for inosine
ucugcucccugaugaggccguuaggccgaangcugggc

SEQ ID NO: 14519 - RNA, 38 nt, Artificial Sequence
  Description of Artificial Sequence:  Enzymatic Nucleic Acid
  misc_feature (31)..(31): n stands for inosine
uguccauccugaugaggccguuaggccgaancuccugg

SEQ ID NO: 14520 - RNA, 38 nt, Artificial Sequence
  Description of Artificial Sequence:  Enzymatic Nucleic Acid
  misc_feature (31)..(31): n stands for inosine
cucaucgccugaugaggccguuaggccgaanuccaucu

SEQ ID NO: 14521 - RNA, 38 nt, Artificial Sequence
  Description of Artificial Sequence:  Enzymatic Nucleic Acid
  misc_feature (31)..(31): n stands for inosine
ccagaaaacugaugaggccguuaggccgaanuccccuc

SEQ ID NO: 14522 - RNA, 38 nt, Artificial Sequence
  Description of Artificial Sequence:  Enzymatic Nucleic Acid
  misc_feature (31)..(31): n stands for inosine
cagaaucccugaugaggccguuaggccgaanaaaaugu

SEQ ID NO: 14523 - RNA, 38 nt, Artificial Sequence
  Description of Artificial Sequence:  Enzymatic Nucleic Acid
  misc_feature (31)..(31): n stands for inosine
ugccuccccugaugaggccguuaggccgaanaauccag

SEQ ID NO: 14524 - RNA, 38 nt, Artificial Sequence
  Description of Artificial Sequence:  Enzymatic Nucleic Acid
  misc_feature (31)..(31): n stands for inosine
ccuuuucucugaugaggccguuaggccgaanccuccca

SEQ ID NO: 14525 - RNA, 38 nt, Artificial Sequence
  Description of Artificial Sequence:  Enzymatic Nucleic Acid
  misc_feature (31)..(31): n stands for inosine
aagauauucugaugaggccguuaggccgaanuccuuuu

SEQ ID NO: 14526 - RNA, 38 nt, Artificial Sequence
  Description of Artificial Sequence:  Enzymatic Nucleic Acid
  misc_feature (31)..(31): n stands for inosine
uccaaaaacugaugaggccguuaggccgaanauauuug

SEQ ID NO: 14527 - RNA, 38 nt, Artificial Sequence
  Description of Artificial Sequence:  Enzymatic Nucleic Acid
  misc_feature (31)..(31): n stands for inosine
uuugcuuucugaugaggccguuaggccgaanuuccaaa

SEQ ID NO: 14528 - RNA, 38 nt, Artificial Sequence
  Description of Artificial Sequence:  Enzymatic Nucleic Acid
  misc_feature (31)..(31): n stands for inosine
cuaaaauucugaugaggccguuaggccgaancuuuagu

SEQ ID NO: 14529 - RNA, 38 nt, Artificial Sequence
  Description of Artificial Sequence:  Enzymatic Nucleic Acid
  misc_feature (31)..(31): n stands for inosine
uagguaaacugaugaggccguuaggccgaanucuaaaa

SEQ ID NO: 14530 - RNA, 38 nt, Artificial Sequence
  Description of Artificial Sequence:  Enzymatic Nucleic Acid
  misc_feature (31)..(31): n stands for inosine
auagguaacugaugaggccguuaggccgaangucuaaa

SEQ ID NO: 14531 - RNA, 38 nt, Artificial Sequence
  Description of Artificial Sequence:  Enzymatic Nucleic Acid
  misc_feature (31)..(31): n stands for inosine
cuuccauacugaugaggccguuaggccgaanuaaaggu

SEQ ID NO: 14532 - RNA, 38 nt, Artificial Sequence
  Description of Artificial Sequence:  Enzymatic Nucleic Acid
  misc_feature (31)..(31): n stands for inosine
acuuccaucugaugaggccguuaggccgaanguaaagg

SEQ ID NO: 14533 - RNA, 38 nt, Artificial Sequence
  Description of Artificial Sequence:  Enzymatic Nucleic Acid
  misc_feature (31)..(31): n stands for inosine
auggacaucugaugaggccguuaggccgaanaaccacu

SEQ ID NO: 14534 - RNA, 38 nt, Artificial Sequence
  Description of Artificial Sequence:  Enzymatic Nucleic Acid
  misc_feature (31)..(31): n stands for inosine
augagaaucugaugaggccguuaggccgaanacauaga

SEQ ID NO: 14535 - RNA, 38 nt, Artificial Sequence
  Description of Artificial Sequence:  Enzymatic Nucleic Acid
  misc_feature (31)..(31): n stands for inosine
aaugagaacugaugaggccguuaggccgaangacauag

SEQ ID NO: 14536 - RNA, 38 nt, Artificial Sequence
  Description of Artificial Sequence:  Enzymatic Nucleic Acid
  misc_feature (31)..(31): n stands for inosine
cacgaaugcugaugaggccguuaggccgaanaauggac

SEQ ID NO: 14537 - RNA, 38 nt, Artificial Sequence
  Description of Artificial Sequence:  Enzymatic Nucleic Acid
  misc_feature (31)..(31): n stands for inosine
gccacgaacugaugaggccguuaggccgaanagaaugg

SEQ ID NO: 14538 - RNA, 38 nt, Artificial Sequence
  Description of Artificial Sequence:  Enzymatic Nucleic Acid
  misc_feature (31)..(31): n stands for inosine
ucaaaacacugaugaggccguuaggccgaanccacgaa

SEQ ID NO: 14539 - RNA, 38 nt, Artificial Sequence
  Description of Artificial Sequence:  Enzymatic Nucleic Acid
  misc_feature (31)..(31): n stands for inosine
acccucagcugaugaggccguuaggccgaancuacaaa

SEQ ID NO: 14540 - RNA, 38 nt, Artificial Sequence
  Description of Artificial Sequence:  Enzymatic Nucleic Acid
  misc_feature (31)..(31): n stands for inosine
ccacccuccugaugaggccguuaggccgaanugcuaca

SEQ ID NO: 14541 - RNA, 38 nt, Artificial Sequence
  Description of Artificial Sequence:  Enzymatic Nucleic Acid
  misc_feature (31)..(31): n stands for inosine
gaguugagcugaugaggccguuaggccgaanccacccu

SEQ ID NO: 14542 - RNA, 38 nt, Artificial Sequence
  Description of Artificial Sequence:  Enzymatic Nucleic Acid
  misc_feature (31)..(31): n stands for inosine
cagaguugcugaugaggccguuaggccgaanugccacc

SEQ ID NO: 14543 - RNA, 38 nt, Artificial Sequence
  Description of Artificial Sequence:  Enzymatic Nucleic Acid
  misc_feature (31)..(31): n stands for inosine
cucagagucugaugaggccguuaggccgaanagugcca

SEQ ID NO: 14544 - RNA, 38 nt, Artificial Sequence
  Description of Artificial Sequence:  Enzymatic Nucleic Acid
  misc_feature (31)..(31): n stands for inosine
gggcucagcugaugaggccguuaggccgaanuugagug

SEQ ID NO: 14545 - RNA, 38 nt, Artificial Sequence
  Description of Artificial Sequence:  Enzymatic Nucleic Acid
  misc_feature (31)..(31): n stands for inosine
augggcuccugaugaggccguuaggccgaanaguugag

SEQ ID NO: 14546 - RNA, 38 nt, Artificial Sequence
  Description of Artificial Sequence:  Enzymatic Nucleic Acid
  misc_feature (31)..(31): n stands for inosine
aaaguaugcugaugaggccguuaggccgaancucagag

SEQ ID NO: 14547 - RNA, 38 nt, Artificial Sequence
  Description of Artificial Sequence:  Enzymatic Nucleic Acid
  misc_feature (31)..(31): n stands for inosine
aaaaguaucugaugaggccguuaggccgaangcucaga

SEQ ID NO: 14548 - RNA, 38 nt, Artificial Sequence
  Description of Artificial Sequence:  Enzymatic Nucleic Acid
  misc_feature (31)..(31): n stands for inosine
caaaaguacugaugaggccguuaggccgaanggcucag

SEQ ID NO: 14549 - RNA, 38 nt, Artificial Sequence
  Description of Artificial Sequence:  Enzymatic Nucleic Acid
  misc_feature (31)..(31): n stands for inosine
gagccaaacugaugaggccguuaggccgaanuaugggc

SEQ ID NO: 14550 - RNA, 38 nt, Artificial Sequence
  Description of Artificial Sequence:  Enzymatic Nucleic Acid
  misc_feature (31)..(31): n stands for inosine
acuagaggcugaugaggccguuaggccgaanccaaaag

SEQ ID NO: 14551 - RNA, 38 nt, Artificial Sequence
  Description of Artificial Sequence:  Enzymatic Nucleic Acid
  misc_feature (31)..(31): n stands for inosine
uuacuagacugaugaggccguuaggccgaanagccaaa

SEQ ID NO: 14552 - RNA, 38 nt, Artificial Sequence
  Description of Artificial Sequence:  Enzymatic Nucleic Acid
  misc_feature (31)..(31): n stands for inosine
cuuacuagcugaugaggccguuaggccgaangagccaa

SEQ ID NO: 14553 - RNA, 38 nt, Artificial Sequence
  Description of Artificial Sequence:  Enzymatic Nucleic Acid
  misc_feature (31)..(31): n stands for inosine
aucuuacucugaugaggccguuaggccgaanaggagcc

SEQ ID NO: 14554 - RNA, 38 nt, Artificial Sequence
  Description of Artificial Sequence:  Enzymatic Nucleic Acid
  misc_feature (31)..(31): n stands for inosine
guuuucagcugaugaggccguuaggccgaancaucuua

SEQ ID NO: 14555 - RNA, 38 nt, Artificial Sequence
  Description of Artificial Sequence:  Enzymatic Nucleic Acid
  misc_feature (31)..(31): n stands for inosine
aaguuuuccugaugaggccguuaggccgaanugcaucu

SEQ ID NO: 14556 - RNA, 38 nt, Artificial Sequence
  Description of Artificial Sequence:  Enzymatic Nucleic Acid
  misc_feature (31)..(31): n stands for inosine
ucuggcuacugaugaggccguuaggccgaanuuuucag

SEQ ID NO: 14557 - RNA, 38 nt, Artificial Sequence
  Description of Artificial Sequence:  Enzymatic Nucleic Acid
  misc_feature (31)..(31): n stands for inosine
cuaacucucugaugaggccguuaggccgaancuaaguu

SEQ ID NO: 14558 - RNA, 38 nt, Artificial Sequence
  Description of Artificial Sequence:  Enzymatic Nucleic Acid
  misc_feature (31)..(31): n stands for inosine
ccuaacuccugaugaggccguuaggccgaangcuaagu

SEQ ID NO: 14559 - RNA, 38 nt, Artificial Sequence
  Description of Artificial Sequence:  Enzymatic Nucleic Acid
  misc_feature (31)..(31): n stands for inosine
uggccuggcugaugaggccguuaggccgaanacaaccu

SEQ ID NO: 14560 - RNA, 38 nt, Artificial Sequence
  Description of Artificial Sequence:  Enzymatic Nucleic Acid
  misc_feature (31)..(31): n stands for inosine
cauggccucugaugaggccguuaggccgaanagacaac

SEQ ID NO: 14561 - RNA, 38 nt, Artificial Sequence
  Description of Artificial Sequence:  Enzymatic Nucleic Acid
  misc_feature (31)..(31): n stands for inosine
ucauggcccugaugaggccguuaggccgaangagacaa

SEQ ID NO: 14562 - RNA, 38 nt, Artificial Sequence
  Description of Artificial Sequence:  Enzymatic Nucleic Acid
  misc_feature (31)..(31): n stands for inosine
gccaucaucugaugaggccguuaggccgaanccuggag

SEQ ID NO: 14563 - RNA, 38 nt, Artificial Sequence
  Description of Artificial Sequence:  Enzymatic Nucleic Acid
  misc_feature (31)..(31): n stands for inosine
ggccaucacugaugaggccguuaggccgaangccugga

SEQ ID NO: 14564 - RNA, 38 nt, Artificial Sequence
  Description of Artificial Sequence:  Enzymatic Nucleic Acid
  misc_feature (31)..(31): n stands for inosine
caguguaacugaugaggccguuaggccgaanccaucau

SEQ ID NO: 14565 - RNA, 38 nt, Artificial Sequence
  Description of Artificial Sequence:  Enzymatic Nucleic Acid
  misc_feature (31)..(31): n stands for inosine
ucaguguacugaugaggccguuaggccgaangccauca

SEQ ID NO: 14566 - RNA, 38 nt, Artificial Sequence
  Description of Artificial Sequence:  Enzymatic Nucleic Acid
  misc_feature (31)..(31): n stands for inosine
auuuucagcugaugaggccguuaggccgaanuaaggcc

SEQ ID NO: 14567 - RNA, 38 nt, Artificial Sequence
  Description of Artificial Sequence:  Enzymatic Nucleic Acid
  misc_feature (31)..(31): n stands for inosine
acauuuuccugaugaggccguuaggccgaanuguaagg

SEQ ID NO: 14568 - RNA, 38 nt, Artificial Sequence
  Description of Artificial Sequence:  Enzymatic Nucleic Acid
  misc_feature (31)..(31): n stands for inosine
auagaaugcugaugaggccguuaggccgaanacauuuu

SEQ ID NO: 14569 - RNA, 38 nt, Artificial Sequence
  Description of Artificial Sequence:  Enzymatic Nucleic Acid
  misc_feature (31)..(31): n stands for inosine
aaauagaacugaugaggccguuaggccgaanugacauu

SEQ ID NO: 14570 - RNA, 38 nt, Artificial Sequence
  Description of Artificial Sequence:  Enzymatic Nucleic Acid
  misc_feature (31)..(31): n stands for inosine
cccaaaaucugaugaggccguuaggccgaanaauguga

SEQ ID NO: 14571 - RNA, 38 nt, Artificial Sequence
  Description of Artificial Sequence:  Enzymatic Nucleic Acid
  misc_feature (31)..(31): n stands for inosine
aagugucucugaugaggccguuaggccgaanacuauau

SEQ ID NO: 14572 - RNA, 38 nt, Artificial Sequence
  Description of Artificial Sequence:  Enzymatic Nucleic Acid
  misc_feature (31)..(31): n stands for inosine
uaaguguccugaugaggccguuaggccgaangacuaua

SEQ ID NO: 14573 - RNA, 38 nt, Artificial Sequence
  Description of Artificial Sequence:  Enzymatic Nucleic Acid
  misc_feature (31)..(31): n stands for inosine
gaguuaagcugaugaggccguuaggccgaanucuggac

SEQ ID NO: 14574 - RNA, 38 nt, Artificial Sequence
  Description of Artificial Sequence:  Enzymatic Nucleic Acid
  misc_feature (31)..(31): n stands for inosine
uugaguuacugaugaggccguuaggccgaanugucugg

SEQ ID NO: 14575 - RNA, 38 nt, Artificial Sequence
  Description of Artificial Sequence:  Enzymatic Nucleic Acid
  misc_feature (31)..(31): n stands for inosine
agaaauugcugaugaggccguuaggccgaanuuaagug

SEQ ID NO: 14576 - RNA, 38 nt, Artificial Sequence
  Description of Artificial Sequence:  Enzymatic Nucleic Acid
  misc_feature (31)..(31): n stands for inosine
caagaaaucugaugaggccguuaggccgaanaguuaag

SEQ ID NO: 14577 - RNA, 38 nt, Artificial Sequence
  Description of Artificial Sequence:  Enzymatic Nucleic Acid
  misc_feature (31)..(31): n stands for inosine
uaauaccacugaugaggccguuaggccgaanaaauuga

SEQ ID NO: 14578 - RNA, 38 nt, Artificial Sequence
  Description of Artificial Sequence:  Enzymatic Nucleic Acid
  misc_feature (31)..(31): n stands for inosine
ugcaaaaccugaugaggccguuaggccgaanaauaaua

SEQ ID NO: 14579 - RNA, 38 nt, Artificial Sequence
  Description of Artificial Sequence:  Enzymatic Nucleic Acid
  misc_feature (31)..(31): n stands for inosine
acuaacugcugaugaggccguuaggccgaancaaaaca

SEQ ID NO: 14580 - RNA, 38 nt, Artificial Sequence
  Description of Artificial Sequence:  Enzymatic Nucleic Acid
  misc_feature (31)..(31): n stands for inosine
caacuaaccugaugaggccguuaggccgaanugcaaaa

SEQ ID NO: 14581 - RNA, 38 nt, Artificial Sequence
  Description of Artificial Sequence:  Enzymatic Nucleic Acid
  misc_feature (31)..(31): n stands for inosine
uucuucuccugaugaggccguuaggccgaancuuucuu

SEQ ID NO: 14582 - RNA, 38 nt, Artificial Sequence
  Description of Artificial Sequence:  Enzymatic Nucleic Acid
  misc_feature (31)..(31): n stands for inosine
cucaggaccugaugaggccguuaggccgaancauuuuc

SEQ ID NO: 14583 - RNA, 38 nt, Artificial Sequence
  Description of Artificial Sequence:  Enzymatic Nucleic Acid
  misc_feature (31)..(31): n stands for inosine
ucuccucacugaugaggccguuaggccgaanacugcau

SEQ ID NO: 14584 - RNA, 38 nt, Artificial Sequence
  Description of Artificial Sequence:  Enzymatic Nucleic Acid
  misc_feature (31)..(31): n stands for inosine
cucuccuccugaugaggccguuaggccgaangacugca

SEQ ID NO: 14585 - RNA, 38 nt, Artificial Sequence
  Description of Artificial Sequence:  Enzymatic Nucleic Acid
  misc_feature (31)..(31): n stands for inosine
ugauauggcugaugaggccguuaggccgaanaaaacuc

SEQ ID NO: 14586 - RNA, 38 nt, Artificial Sequence
  Description of Artificial Sequence:  Enzymatic Nucleic Acid
  misc_feature (31)..(31): n stands for inosine
uuugauaucugaugaggccguuaggccgaanagaaaac

SEQ ID NO: 14587 - RNA, 38 nt, Artificial Sequence
  Description of Artificial Sequence:  Enzymatic Nucleic Acid
  misc_feature (31)..(31): n stands for inosine
uuuugauacugaugaggccguuaggccgaangagaaaa

SEQ ID NO: 14588 - RNA, 38 nt, Artificial Sequence
  Description of Artificial Sequence:  Enzymatic Nucleic Acid
  misc_feature (31)..(31): n stands for inosine
ccucguuucugaugaggccguuaggccgaanauaugga

SEQ ID NO: 14589 - RNA, 38 nt, Artificial Sequence
  Description of Artificial Sequence:  Enzymatic Nucleic Acid
  misc_feature (31)..(31): n stands for inosine
ccuccauccugaugaggccguuaggccgaancccucgu

SEQ ID NO: 14590 - RNA, 38 nt, Artificial Sequence
  Description of Artificial Sequence:  Enzymatic Nucleic Acid
  misc_feature (31)..(31): n stands for inosine
gaccuuaucugaugaggccguuaggccgaanaccuuuu

SEQ ID NO: 14591 - RNA, 38 nt, Artificial Sequence
  Description of Artificial Sequence:  Enzymatic Nucleic Acid
  misc_feature (31)..(31): n stands for inosine
ucuucccucugaugaggccguuaggccgaanaccuuau

SEQ ID NO: 14592 - RNA, 38 nt, Artificial Sequence
  Description of Artificial Sequence:  Enzymatic Nucleic Acid
  misc_feature (31)..(31): n stands for inosine
agagacggcugaugaggccguuaggccgaanucuuccc

SEQ ID NO: 14593 - RNA, 38 nt, Artificial Sequence
  Description of Artificial Sequence:  Enzymatic Nucleic Acid
  misc_feature (31)..(31): n stands for inosine
uagagacgcugaugaggccguuaggccgaangucuucc

SEQ ID NO: 14594 - RNA, 38 nt, Artificial Sequence
  Description of Artificial Sequence:  Enzymatic Nucleic Acid
  misc_feature (31)..(31): n stands for inosine
auagagaccugaugaggccguuaggccgaanggucuuc

SEQ ID NO: 14595 - RNA, 38 nt, Artificial Sequence
  Description of Artificial Sequence:  Enzymatic Nucleic Acid
  misc_feature (31)..(31): n stands for inosine
ugguauagcugaugaggccguuaggccgaanacggggu

SEQ ID NO: 14596 - RNA, 38 nt, Artificial Sequence
  Description of Artificial Sequence:  Enzymatic Nucleic Acid
  misc_feature (31)..(31): n stands for inosine
guugguaucugaugaggccguuaggccgaanagacggg

SEQ ID NO: 14597 - RNA, 38 nt, Artificial Sequence
  Description of Artificial Sequence:  Enzymatic Nucleic Acid
  misc_feature (31)..(31): n stands for inosine
guuugguucugaugaggccguuaggccgaanuauagag

SEQ ID NO: 14598 - RNA, 38 nt, Artificial Sequence
  Description of Artificial Sequence:  Enzymatic Nucleic Acid
  misc_feature (31)..(31): n stands for inosine
gguuuggucugaugaggccguuaggccgaanguauaga

SEQ ID NO: 14599 - RNA, 38 nt, Artificial Sequence
  Description of Artificial Sequence:  Enzymatic Nucleic Acid
  misc_feature (31)..(31): n stands for inosine
auugguuucugaugaggccguuaggccgaanuugguau

SEQ ID NO: 14600 - RNA, 38 nt, Artificial Sequence
  Description of Artificial Sequence:  Enzymatic Nucleic Acid
  misc_feature (31)..(31): n stands for inosine
aauugguucugaugaggccguuaggccgaanguuggua

SEQ ID NO: 14601 - RNA, 38 nt, Artificial Sequence
  Description of Artificial Sequence:  Enzymatic Nucleic Acid
  misc_feature (31)..(31): n stands for inosine
ggugaauucugaugaggccguuaggccgaanuuugguu

SEQ ID NO: 14602 - RNA, 38 nt, Artificial Sequence
  Description of Artificial Sequence:  Enzymatic Nucleic Acid
  misc_feature (31)..(31): n stands for inosine
uggugaaucugaugaggccguuaggccgaanguuuggu

SEQ ID NO: 14603 - RNA, 38 nt, Artificial Sequence
  Description of Artificial Sequence:  Enzymatic Nucleic Acid
  misc_feature (31)..(31): n stands for inosine
uguguuggcugaugaggccguuaggccgaanaauuggu

SEQ ID NO: 14604 - RNA, 38 nt, Artificial Sequence
  Description of Artificial Sequence:  Enzymatic Nucleic Acid
  misc_feature (31)..(31): n stands for inosine
acuguguucugaugaggccguuaggccgaanugaauug

SEQ ID NO: 14605 - RNA, 38 nt, Artificial Sequence
  Description of Artificial Sequence:  Enzymatic Nucleic Acid
  misc_feature (31)..(31): n stands for inosine
aacugugucugaugaggccguuaggccgaangugaauu

SEQ ID NO: 14606 - RNA, 38 nt, Artificial Sequence
  Description of Artificial Sequence:  Enzymatic Nucleic Acid
  misc_feature (31)..(31): n stands for inosine
cccaacugcugaugaggccguuaggccgaanuugguga

SEQ ID NO: 14607 - RNA, 38 nt, Artificial Sequence
  Description of Artificial Sequence:  Enzymatic Nucleic Acid
  misc_feature (31)..(31): n stands for inosine
gucccaaccugaugaggccguuaggccgaanuguuggu

SEQ ID NO: 14608 - RNA, 38 nt, Artificial Sequence
  Description of Artificial Sequence:  Enzymatic Nucleic Acid
  misc_feature (31)..(31): n stands for inosine
guguuuugcugaugaggccguuaggccgaanucccaac

SEQ ID NO: 14609 - RNA, 38 nt, Artificial Sequence
  Description of Artificial Sequence:  Enzymatic Nucleic Acid
  misc_feature (31)..(31): n stands for inosine
uguguuuucugaugaggccguuaggccgaangucccaa

SEQ ID NO: 14610 - RNA, 38 nt, Artificial Sequence
  Description of Artificial Sequence:  Enzymatic Nucleic Acid
  misc_feature (31)..(31): n stands for inosine
cuguguuucugaugaggccguuaggccgaangguccca

SEQ ID NO: 14611 - RNA, 38 nt, Artificial Sequence
  Description of Artificial Sequence:  Enzymatic Nucleic Acid
  misc_feature (31)..(31): n stands for inosine
acuuccugcugaugaggccguuaggccgaanuuuuggg

SEQ ID NO: 14612 - RNA, 38 nt, Artificial Sequence
  Description of Artificial Sequence:  Enzymatic Nucleic Acid
  misc_feature (31)..(31): n stands for inosine
ugacuucccugaugaggccguuaggccgaanuguuuug

SEQ ID NO: 14613 - RNA, 38 nt, Artificial Sequence
  Description of Artificial Sequence:  Enzymatic Nucleic Acid
  misc_feature (31)..(31): n stands for inosine
aacgugaccugaugaggccguuaggccgaanacuuccu

SEQ ID NO: 14614 - RNA, 38 nt, Artificial Sequence
  Description of Artificial Sequence:  Enzymatic Nucleic Acid
  misc_feature (31)..(31): n stands for inosine
aggaaacgcugaugaggccguuaggccgaanacugacu

SEQ ID NO: 14615 - RNA, 38 nt, Artificial Sequence
  Description of Artificial Sequence:  Enzymatic Nucleic Acid
  misc_feature (31)..(31): n stands for inosine
aaugaaaacugaugaggccguuaggccgaanaaacgug

SEQ ID NO: 14616 - RNA, 38 nt, Artificial Sequence
  Description of Artificial Sequence:  Enzymatic Nucleic Acid
  misc_feature (31)..(31): n stands for inosine
aaaugaaacugaugaggccguuaggccgaangaaacgu

SEQ ID NO: 14617 - RNA, 38 nt, Artificial Sequence
  Description of Artificial Sequence:  Enzymatic Nucleic Acid
  misc_feature (31)..(31): n stands for inosine
ccauuaaacugaugaggccguuaggccgaanaaaagga

SEQ ID NO: 14618 - RNA, 38 nt, Artificial Sequence
  Description of Artificial Sequence:  Enzymatic Nucleic Acid
  misc_feature (31)..(31): n stands for inosine
gagauagucugaugaggccguuaggccgaanaaucccc

SEQ ID NO: 14619 - RNA, 38 nt, Artificial Sequence
  Description of Artificial Sequence:  Enzymatic Nucleic Acid
  misc_feature (31)..(31): n stands for inosine
ugagauagcugaugaggccguuaggccgaangaauccc

SEQ ID NO: 14620 - RNA, 38 nt, Artificial Sequence
  Description of Artificial Sequence:  Enzymatic Nucleic Acid
  misc_feature (31)..(31): n stands for inosine
ugugagaucugaugaggccguuaggccgaanuggaauc

SEQ ID NO: 14621 - RNA, 38 nt, Artificial Sequence
  Description of Artificial Sequence:  Enzymatic Nucleic Acid
  misc_feature (31)..(31): n stands for inosine
uuagugugcugaugaggccguuaggccgaanauagugg

SEQ ID NO: 14622 - RNA, 38 nt, Artificial Sequence
  Description of Artificial Sequence:  Enzymatic Nucleic Acid
  misc_feature (31)..(31): n stands for inosine
gauuagugcugaugaggccguuaggccgaanagauagu

SEQ ID NO: 14623 - RNA, 38 nt, Artificial Sequence
  Description of Artificial Sequence:  Enzymatic Nucleic Acid
  misc_feature (31)..(31): n stands for inosine
cagauuagcugaugaggccguuaggccgaanugagaua

SEQ ID NO: 14624 - RNA, 38 nt, Artificial Sequence
  Description of Artificial Sequence:  Enzymatic Nucleic Acid
  misc_feature (31)..(31): n stands for inosine
uucagauucugaugaggccguuaggccgaanugugaga

SEQ ID NO: 14625 - RNA, 38 nt, Artificial Sequence
  Description of Artificial Sequence:  Enzymatic Nucleic Acid
  misc_feature (31)..(31): n stands for inosine
auccuuuccugaugaggccguuaggccgaanauuagug

SEQ ID NO: 14626 - RNA, 38 nt, Artificial Sequence
  Description of Artificial Sequence:  Enzymatic Nucleic Acid
  misc_feature (31)..(31): n stands for inosine
ccagcuaacugaugaggccguuaggccgaancucuucc

SEQ ID NO: 14627 - RNA, 38 nt, Artificial Sequence
  Description of Artificial Sequence:  Enzymatic Nucleic Acid
  misc_feature (31)..(31): n stands for inosine
uaugcgcccugaugaggccguuaggccgaancuaaugc

SEQ ID NO: 14628 - RNA, 38 nt, Artificial Sequence
  Description of Artificial Sequence:  Enzymatic Nucleic Acid
  misc_feature (31)..(31): n stands for inosine
gcuuaauacugaugaggccguuaggccgaancgccagc

SEQ ID NO: 14629 - RNA, 38 nt, Artificial Sequence
  Description of Artificial Sequence:  Enzymatic Nucleic Acid
  misc_feature (31)..(31): n stands for inosine
gcuuaaagcugaugaggccguuaggccgaancuuaaua

SEQ ID NO: 14630 - RNA, 38 nt, Artificial Sequence
  Description of Artificial Sequence:  Enzymatic Nucleic Acid
  misc_feature (31)..(31): n stands for inosine
gagcuuaacugaugaggccguuaggccgaanugcuuaa

SEQ ID NO: 14631 - RNA, 38 nt, Artificial Sequence
  Description of Artificial Sequence:  Enzymatic Nucleic Acid
  misc_feature (31)..(31): n stands for inosine
acucaaggcugaugaggccguuaggccgaancuuaaag

SEQ ID NO: 14632 - RNA, 38 nt, Artificial Sequence
  Description of Artificial Sequence:  Enzymatic Nucleic Acid
  misc_feature (31)..(31): n stands for inosine
uuacucaacugaugaggccguuaggccgaanagcuuaa

SEQ ID NO: 14633 - RNA, 38 nt, Artificial Sequence
  Description of Artificial Sequence:  Enzymatic Nucleic Acid
  misc_feature (31)..(31): n stands for inosine
uuuacucacugaugaggccguuaggccgaangagcuua

SEQ ID NO: 14634 - RNA, 38 nt, Artificial Sequence
  Description of Artificial Sequence:  Enzymatic Nucleic Acid
  misc_feature (31)..(31): n stands for inosine
aaauaccucugaugaggccguuaggccgaancauaaau

SEQ ID NO: 14635 - RNA, 38 nt, Artificial Sequence
  Description of Artificial Sequence:  Enzymatic Nucleic Acid
  misc_feature (31)..(31): n stands for inosine
ccaacuggcugaugaggccguuaggccgaanaaauacc

SEQ ID NO: 14636 - RNA, 38 nt, Artificial Sequence
  Description of Artificial Sequence:  Enzymatic Nucleic Acid
  misc_feature (31)..(31): n stands for inosine
ucccaacucugaugaggccguuaggccgaanagaaaua

SEQ ID NO: 14637 - RNA, 38 nt, Artificial Sequence
  Description of Artificial Sequence:  Enzymatic Nucleic Acid
  misc_feature (31)..(31): n stands for inosine
gucccaaccugaugaggccguuaggccgaangagaaau

SEQ ID NO: 14638 - RNA, 38 nt, Artificial Sequence
  Description of Artificial Sequence:  Enzymatic Nucleic Acid
  misc_feature (31)..(31): n stands for inosine
auauccugcugaugaggccguuaggccgaanucccaac

SEQ ID NO: 14639 - RNA, 38 nt, Artificial Sequence
  Description of Artificial Sequence:  Enzymatic Nucleic Acid
  misc_feature (31)..(31): n stands for inosine
uaauaucccugaugaggccguuaggccgaanaguccca

SEQ ID NO: 14640 - RNA, 38 nt, Artificial Sequence
  Description of Artificial Sequence:  Enzymatic Nucleic Acid
  misc_feature (31)..(31): n stands for inosine
cuagugaucugaugaggccguuaggccgaancucauua

SEQ ID NO: 14641 - RNA, 38 nt, Artificial Sequence
  Description of Artificial Sequence:  Enzymatic Nucleic Acid
  misc_feature (31)..(31): n stands for inosine
ucuagugacugaugaggccguuaggccgaangcucauu

SEQ ID NO: 14642 - RNA, 38 nt, Artificial Sequence
  Description of Artificial Sequence:  Enzymatic Nucleic Acid
  misc_feature (31)..(31): n stands for inosine
ucuucuagcugaugaggccguuaggccgaanauggcuc

SEQ ID NO: 14643 - RNA, 38 nt, Artificial Sequence
  Description of Artificial Sequence:  Enzymatic Nucleic Acid
  misc_feature (31)..(31): n stands for inosine
uuucuucucugaugaggccguuaggccgaanugauggc

SEQ ID NO: 14644 - RNA, 38 nt, Artificial Sequence
  Description of Artificial Sequence:  Enzymatic Nucleic Acid
  misc_feature (31)..(31): n stands for inosine
ugaaaaugcugaugaggccguuaggccgaancuuuucu

SEQ ID NO: 14645 - RNA, 38 nt, Artificial Sequence
  Description of Artificial Sequence:  Enzymatic Nucleic Acid
  misc_feature (31)..(31): n stands for inosine
uugaaaaucugaugaggccguuaggccgaangcuuuuc

SEQ ID NO: 14646 - RNA, 38 nt, Artificial Sequence
  Description of Artificial Sequence:  Enzymatic Nucleic Acid
  misc_feature (31)..(31): n stands for inosine
guugaaaacugaugaggccguuaggccgaanggcuuuu

SEQ ID NO: 14647 - RNA, 38 nt, Artificial Sequence
  Description of Artificial Sequence:  Enzymatic Nucleic Acid
  misc_feature (31)..(31): n stands for inosine
aaagcagucugaugaggccguuaggccgaanaaaaugg

SEQ ID NO: 14648 - RNA, 38 nt, Artificial Sequence
  Description of Artificial Sequence:  Enzymatic Nucleic Acid
  misc_feature (31)..(31): n stands for inosine
uucaaagccugaugaggccguuaggccgaanuugaaaa

SEQ ID NO: 14649 - RNA, 38 nt, Artificial Sequence
  Description of Artificial Sequence:  Enzymatic Nucleic Acid
  misc_feature (31)..(31): n stands for inosine
aguuucaacugaugaggccguuaggccgaancaguuga

SEQ ID NO: 14650 - RNA, 38 nt, Artificial Sequence
  Description of Artificial Sequence:  Enzymatic Nucleic Acid
  misc_feature (31)..(31): n stands for inosine
cccaggcacugaugaggccguuaggccgaanuuucaaa

SEQ ID NO: 14651 - RNA, 38 nt, Artificial Sequence
  Description of Artificial Sequence:  Enzymatic Nucleic Acid
  misc_feature (31)..(31): n stands for inosine
agaccccacugaugaggccguuaggccgaancaaguuu

SEQ ID NO: 14652 - RNA, 38 nt, Artificial Sequence
  Description of Artificial Sequence:  Enzymatic Nucleic Acid
  misc_feature (31)..(31): n stands for inosine
cagacccccugaugaggccguuaggccgaangcaaguu

SEQ ID NO: 14653 - RNA, 38 nt, Artificial Sequence
  Description of Artificial Sequence:  Enzymatic Nucleic Acid
  misc_feature (31)..(31): n stands for inosine
ucaugcuccugaugaggccguuaggccgaanaccccag

SEQ ID NO: 14654 - RNA, 38 nt, Artificial Sequence
  Description of Artificial Sequence:  Enzymatic Nucleic Acid
  misc_feature (31)..(31): n stands for inosine
ucccaucacugaugaggccguuaggccgaancucagac

SEQ ID NO: 14655 - RNA, 38 nt, Artificial Sequence
  Description of Artificial Sequence:  Enzymatic Nucleic Acid
  misc_feature (31)..(31): n stands for inosine
uccuaccccugaugaggccguuaggccgaanucucccu

SEQ ID NO: 14656 - RNA, 38 nt, Artificial Sequence
  Description of Artificial Sequence:  Enzymatic Nucleic Acid
  misc_feature (31)..(31): n stands for inosine
gaagaguacugaugaggccguuaggccgaancgcccuu

SEQ ID NO: 14657 - RNA, 38 nt, Artificial Sequence
  Description of Artificial Sequence:  Enzymatic Nucleic Acid
  misc_feature (31)..(31): n stands for inosine
ugaagagucugaugaggccguuaggccgaangcgcccu

SEQ ID NO: 14658 - RNA, 38 nt, Artificial Sequence
  Description of Artificial Sequence:  Enzymatic Nucleic Acid
  misc_feature (31)..(31): n stands for inosine
cccugaagcugaugaggccguuaggccgaanuaggcgc

SEQ ID NO: 14659 - RNA, 38 nt, Artificial Sequence
  Description of Artificial Sequence:  Enzymatic Nucleic Acid
  misc_feature (31)..(31): n stands for inosine
gacccugacugaugaggccguuaggccgaanaguaggc

SEQ ID NO: 14660 - RNA, 38 nt, Artificial Sequence
  Description of Artificial Sequence:  Enzymatic Nucleic Acid
  misc_feature (31)..(31): n stands for inosine
uuagaccccugaugaggccguuaggccgaanaagagua

SEQ ID NO: 14661 - RNA, 38 nt, Artificial Sequence
  Description of Artificial Sequence:  Enzymatic Nucleic Acid
  misc_feature (31)..(31): n stands for inosine
ugaucuuucugaugaggccguuaggccgaanacccuga

SEQ ID NO: 14662 - RNA, 38 nt, Artificial Sequence
  Description of Artificial Sequence:  Enzymatic Nucleic Acid
  misc_feature (31)..(31): n stands for inosine
ggcccacucugaugaggccguuaggccgaanaucuuua

SEQ ID NO: 14663 - RNA, 38 nt, Artificial Sequence
  Description of Artificial Sequence:  Enzymatic Nucleic Acid
  misc_feature (31)..(31): n stands for inosine
cgauccaacugaugaggccguuaggccgaancccacuu

SEQ ID NO: 14664 - RNA, 38 nt, Artificial Sequence
  Description of Artificial Sequence:  Enzymatic Nucleic Acid
  misc_feature (31)..(31): n stands for inosine
gcgauccacugaugaggccguuaggccgaangcccacu

SEQ ID NO: 14665 - RNA, 38 nt, Artificial Sequence
  Description of Artificial Sequence:  Enzymatic Nucleic Acid
  misc_feature (31)..(31): n stands for inosine
gccagcuucugaugaggccguuaggccgaancgaucca

SEQ ID NO: 14666 - RNA, 38 nt, Artificial Sequence
  Description of Artificial Sequence:  Enzymatic Nucleic Acid
  misc_feature (31)..(31): n stands for inosine
acagagcccugaugaggccguuaggccgaancuuagcg

SEQ ID NO: 14667 - RNA, 38 nt, Artificial Sequence
  Description of Artificial Sequence:  Enzymatic Nucleic Acid
  misc_feature (31)..(31): n stands for inosine
ucaaacagcugaugaggccguuaggccgaanccagcuu

SEQ ID NO: 14668 - RNA, 38 nt, Artificial Sequence
  Description of Artificial Sequence:  Enzymatic Nucleic Acid
  misc_feature (31)..(31): n stands for inosine
caucaaaccugaugaggccguuaggccgaanagccagc

SEQ ID NO: 14669 - RNA, 38 nt, Artificial Sequence
  Description of Artificial Sequence:  Enzymatic Nucleic Acid
  misc_feature (31)..(31): n stands for inosine
gcauaaaucugaugaggccguuaggccgaancaucaaa

SEQ ID NO: 14670 - RNA, 38 nt, Artificial Sequence
  Description of Artificial Sequence:  Enzymatic Nucleic Acid
  misc_feature (31)..(31): n stands for inosine
cccuaacucugaugaggccguuaggccgaancauaaau

SEQ ID NO: 14671 - RNA, 38 nt, Artificial Sequence
  Description of Artificial Sequence:  Enzymatic Nucleic Acid
  misc_feature (31)..(31): n stands for inosine
aaauacaucugaugaggccguuaggccgaanacccuaa

SEQ ID NO: 14672 - RNA, 38 nt, Artificial Sequence
  Description of Artificial Sequence:  Enzymatic Nucleic Acid
  misc_feature (31)..(31): n stands for inosine
gaagaguacugaugaggccguuaggccgaancgcaucc

SEQ ID NO: 14673 - RNA, 38 nt, Artificial Sequence
  Description of Artificial Sequence:  Enzymatic Nucleic Acid
  misc_feature (31)..(31): n stands for inosine
ugaagagucugaugaggccguuaggccgaangcgcauc

SEQ ID NO: 14674 - RNA, 38 nt, Artificial Sequence
  Description of Artificial Sequence:  Enzymatic Nucleic Acid
  misc_feature (31)..(31): n stands for inosine
gaaggugccugaugaggccguuaggccgaanacauccu

SEQ ID NO: 14675 - RNA, 38 nt, Artificial Sequence
  Description of Artificial Sequence:  Enzymatic Nucleic Acid
  misc_feature (31)..(31): n stands for inosine
gcagaaggcugaugaggccguuaggccgaancagacau

SEQ ID NO: 14676 - RNA, 38 nt, Artificial Sequence
  Description of Artificial Sequence:  Enzymatic Nucleic Acid
  misc_feature (31)..(31): n stands for inosine
cugcagaacugaugaggccguuaggccgaanugcagac

SEQ ID NO: 14677 - RNA, 38 nt, Artificial Sequence
  Description of Artificial Sequence:  Enzymatic Nucleic Acid
  misc_feature (31)..(31): n stands for inosine
gcugcagacugaugaggccguuaggccgaangugcaga

SEQ ID NO: 14678 - RNA, 38 nt, Artificial Sequence
  Description of Artificial Sequence:  Enzymatic Nucleic Acid
  misc_feature (31)..(31): n stands for inosine
cuggcugccugaugaggccguuaggccgaanaaggugc

SEQ ID NO: 14679 - RNA, 38 nt, Artificial Sequence
  Description of Artificial Sequence:  Enzymatic Nucleic Acid
  misc_feature (31)..(31): n stands for inosine
ugacuggccugaugaggccguuaggccgaancagaagg

SEQ ID NO: 14680 - RNA, 38 nt, Artificial Sequence
  Description of Artificial Sequence:  Enzymatic Nucleic Acid
  misc_feature (31)..(31): n stands for inosine
uucugacucugaugaggccguuaggccgaancugcaga

SEQ ID NO: 14681 - RNA, 38 nt, Artificial Sequence
  Description of Artificial Sequence:  Enzymatic Nucleic Acid
  misc_feature (31)..(31): n stands for inosine
cuucugaccugaugaggccguuaggccgaangcugcag

SEQ ID NO: 14682 - RNA, 38 nt, Artificial Sequence
  Description of Artificial Sequence:  Enzymatic Nucleic Acid
  misc_feature (31)..(31): n stands for inosine
ccagcuuccugaugaggccguuaggccgaanacuggcu

SEQ ID NO: 14683 - RNA, 38 nt, Artificial Sequence
  Description of Artificial Sequence:  Enzymatic Nucleic Acid
  misc_feature (31)..(31): n stands for inosine
gccucucccugaugaggccguuaggccgaancuucuga

SEQ ID NO: 14684 - RNA, 38 nt, Artificial Sequence
  Description of Artificial Sequence:  Enzymatic Nucleic Acid
  misc_feature (31)..(31): n stands for inosine
uccacugucugaugaggccguuaggccgaanccucucc

SEQ ID NO: 14685 - RNA, 38 nt, Artificial Sequence
  Description of Artificial Sequence:  Enzymatic Nucleic Acid
  misc_feature (31)..(31): n stands for inosine
caauccaccugaugaggccguuaggccgaanuugccuc

SEQ ID NO: 14686 - RNA, 38 nt, Artificial Sequence
  Description of Artificial Sequence:  Enzymatic Nucleic Acid
  misc_feature (31)..(31): n stands for inosine
caagaagccugaugaggccguuaggccgaancaaucca

SEQ ID NO: 14687 - RNA, 38 nt, Artificial Sequence
  Description of Artificial Sequence:  Enzymatic Nucleic Acid
  misc_feature (31)..(31): n stands for inosine
ccccaagacugaugaggccguuaggccgaancagcaau

SEQ ID NO: 14688 - RNA, 38 nt, Artificial Sequence
  Description of Artificial Sequence:  Enzymatic Nucleic Acid
  misc_feature (31)..(31): n stands for inosine
ucuccccacugaugaggccguuaggccgaanaagcagc

SEQ ID NO: 14689 - RNA, 38 nt, Artificial Sequence
  Description of Artificial Sequence:  Enzymatic Nucleic Acid
  misc_feature (31)..(31): n stands for inosine
uaaaaggacugaugaggccguuaggccgaancauacuc

SEQ ID NO: 14690 - RNA, 38 nt, Artificial Sequence
  Description of Artificial Sequence:  Enzymatic Nucleic Acid
  misc_feature (31)..(31): n stands for inosine
ggauaaaacugaugaggccguuaggccgaanaagcaua

SEQ ID NO: 14691 - RNA, 38 nt, Artificial Sequence
  Description of Artificial Sequence:  Enzymatic Nucleic Acid
  misc_feature (31)..(31): n stands for inosine
uggauaaacugaugaggccguuaggccgaangaagcau

SEQ ID NO: 14692 - RNA, 38 nt, Artificial Sequence
  Description of Artificial Sequence:  Enzymatic Nucleic Acid
  misc_feature (31)..(31): n stands for inosine
aauuacaucugaugaggccguuaggccgaanauaaaag

SEQ ID NO: 14693 - RNA, 38 nt, Artificial Sequence
  Description of Artificial Sequence:  Enzymatic Nucleic Acid
  misc_feature (31)..(31): n stands for inosine
aaauuacacugaugaggccguuaggccgaangauaaaa

SEQ ID NO: 14694 - RNA, 38 nt, Artificial Sequence
  Description of Artificial Sequence:  Enzymatic Nucleic Acid
  misc_feature (31)..(31): n stands for inosine
gguucuaccugaugaggccguuaggccgaanuuaaauu

SEQ ID NO: 14695 - RNA, 38 nt, Artificial Sequence
  Description of Artificial Sequence:  Enzymatic Nucleic Acid
  misc_feature (31)..(31): n stands for inosine
agagcucacugaugaggccguuaggccgaanuucuaca

SEQ ID NO: 14696 - RNA, 38 nt, Artificial Sequence
  Description of Artificial Sequence:  Enzymatic Nucleic Acid
  misc_feature (31)..(31): n stands for inosine
uagagcuccugaugaggccguuaggccgaanguucuac

SEQ ID NO: 14697 - RNA, 38 nt, Artificial Sequence
  Description of Artificial Sequence:  Enzymatic Nucleic Acid
  misc_feature (31)..(31): n stands for inosine
uuacuuagcugaugaggccguuaggccgaancucaggu

SEQ ID NO: 14698 - RNA, 38 nt, Artificial Sequence
  Description of Artificial Sequence:  Enzymatic Nucleic Acid
  misc_feature (31)..(31): n stands for inosine
gguuacuucugaugaggccguuaggccgaanagcucag

SEQ ID NO: 14699 - RNA, 38 nt, Artificial Sequence
  Description of Artificial Sequence:  Enzymatic Nucleic Acid
  misc_feature (31)..(31): n stands for inosine
cauucuuccugaugaggccguuaggccgaanuuacuua

SEQ ID NO: 14700 - RNA, 38 nt, Artificial Sequence
  Description of Artificial Sequence:  Enzymatic Nucleic Acid
  misc_feature (31)..(31): n stands for inosine
agaacagacugaugaggccguuaggccgaancauacau

SEQ ID NO: 14701 - RNA, 38 nt, Artificial Sequence
  Description of Artificial Sequence:  Enzymatic Nucleic Acid
  misc_feature (31)..(31): n stands for inosine
aagaacagcugaugaggccguuaggccgaangcauaca

SEQ ID NO: 14702 - RNA, 38 nt, Artificial Sequence
  Description of Artificial Sequence:  Enzymatic Nucleic Acid
  misc_feature (31)..(31): n stands for inosine
auaagaaccugaugaggccguuaggccgaanaggcaua

SEQ ID NO: 14703 - RNA, 38 nt, Artificial Sequence
  Description of Artificial Sequence:  Enzymatic Nucleic Acid
  misc_feature (31)..(31): n stands for inosine
ggcacauacugaugaggccguuaggccgaanaacagag

SEQ ID NO: 14704 - RNA, 38 nt, Artificial Sequence
  Description of Artificial Sequence:  Enzymatic Nucleic Acid
  misc_feature (31)..(31): n stands for inosine
aaggaugucugaugaggccguuaggccgaancacauaa

SEQ ID NO: 14705 - RNA, 38 nt, Artificial Sequence
  Description of Artificial Sequence:  Enzymatic Nucleic Acid
  misc_feature (31)..(31): n stands for inosine
caaggaugcugaugaggccguuaggccgaangcacaua

SEQ ID NO: 14706 - RNA, 38 nt, Artificial Sequence
  Description of Artificial Sequence:  Enzymatic Nucleic Acid
  misc_feature (31)..(31): n stands for inosine
aacaaggacugaugaggccguuaggccgaanuggcaca

SEQ ID NO: 14707 - RNA, 38 nt, Artificial Sequence
  Description of Artificial Sequence:  Enzymatic Nucleic Acid
  misc_feature (31)..(31): n stands for inosine
uuaaacaacugaugaggccguuaggccgaanauguggc

SEQ ID NO: 14708 - RNA, 38 nt, Artificial Sequence
  Description of Artificial Sequence:  Enzymatic Nucleic Acid
  misc_feature (31)..(31): n stands for inosine
uuuaaacacugaugaggccguuaggccgaangaugugg

SEQ ID NO: 14709 - RNA, 38 nt, Artificial Sequence
  Description of Artificial Sequence:  Enzymatic Nucleic Acid
  misc_feature (31)..(31): n stands for inosine
auacagagcugaugaggccguuaggccgaanccuuuaa

SEQ ID NO: 14710 - RNA, 38 nt, Artificial Sequence
  Description of Artificial Sequence:  Enzymatic Nucleic Acid
  misc_feature (31)..(31): n stands for inosine
ucauacagcugaugaggccguuaggccgaanagccuuu

SEQ ID NO: 14711 - RNA, 38 nt, Artificial Sequence
  Description of Artificial Sequence:  Enzymatic Nucleic Acid
  misc_feature (31)..(31): n stands for inosine
cuucauaccugaugaggccguuaggccgaanagagccu

SEQ ID NO: 14712 - RNA, 38 nt, Artificial Sequence
  Description of Artificial Sequence:  Enzymatic Nucleic Acid
  misc_feature (31)..(31): n stands for inosine
cugaugaccugaugaggccguuaggccgaanucccauc

SEQ ID NO: 14713 - RNA, 38 nt, Artificial Sequence
  Description of Artificial Sequence:  Enzymatic Nucleic Acid
  misc_feature (31)..(31): n stands for inosine
ugugcugacugaugaggccguuaggccgaanacggucc

SEQ ID NO: 14714 - RNA, 38 nt, Artificial Sequence
  Description of Artificial Sequence:  Enzymatic Nucleic Acid
  misc_feature (31)..(31): n stands for inosine
gaaugugccugaugaggccguuaggccgaanaugacgg

SEQ ID NO: 14715 - RNA, 38 nt, Artificial Sequence
  Description of Artificial Sequence:  Enzymatic Nucleic Acid
  misc_feature (31)..(31): n stands for inosine
agggaaugcugaugaggccguuaggccgaancugauga

SEQ ID NO: 14716 - RNA, 38 nt, Artificial Sequence
  Description of Artificial Sequence:  Enzymatic Nucleic Acid
  misc_feature (31)..(31): n stands for inosine
cuagggaacugaugaggccguuaggccgaanugcugau

SEQ ID NO: 14717 - RNA, 38 nt, Artificial Sequence
  Description of Artificial Sequence:  Enzymatic Nucleic Acid
  misc_feature (31)..(31): n stands for inosine
cucacuagcugaugaggccguuaggccgaanaaugugc

SEQ ID NO: 14718 - RNA, 38 nt, Artificial Sequence
  Description of Artificial Sequence:  Enzymatic Nucleic Acid
  misc_feature (31)..(31): n stands for inosine
gcucacuacugaugaggccguuaggccgaangaaugug

SEQ ID NO: 14719 - RNA, 38 nt, Artificial Sequence
  Description of Artificial Sequence:  Enzymatic Nucleic Acid
  misc_feature (31)..(31): n stands for inosine
ggcucacucugaugaggccguuaggccgaanggaaugu

SEQ ID NO: 14720 - RNA, 38 nt, Artificial Sequence
  Description of Artificial Sequence:  Enzymatic Nucleic Acid
  misc_feature (31)..(31): n stands for inosine
agccaguacugaugaggccguuaggccgaancucacua

SEQ ID NO: 14721 - RNA, 38 nt, Artificial Sequence
  Description of Artificial Sequence:  Enzymatic Nucleic Acid
  misc_feature (31)..(31): n stands for inosine
gagccagucugaugaggccguuaggccgaangcucacu

SEQ ID NO: 14722 - RNA, 38 nt, Artificial Sequence
  Description of Artificial Sequence:  Enzymatic Nucleic Acid
  misc_feature (31)..(31): n stands for inosine
caggagcccugaugaggccguuaggccgaanuaggcuc

SEQ ID NO: 14723 - RNA, 38 nt, Artificial Sequence
  Description of Artificial Sequence:  Enzymatic Nucleic Acid
  misc_feature (31)..(31): n stands for inosine
cugccaggcugaugaggccguuaggccgaanccaguag

SEQ ID NO: 14724 - RNA, 38 nt, Artificial Sequence
  Description of Artificial Sequence:  Enzymatic Nucleic Acid
  misc_feature (31)..(31): n stands for inosine
cgcugccacugaugaggccguuaggccgaanagccagu

SEQ ID NO: 14725 - RNA, 38 nt, Artificial Sequence
  Description of Artificial Sequence:  Enzymatic Nucleic Acid
  misc_feature (31)..(31): n stands for inosine
ccgcugcccugaugaggccguuaggccgaangagccag

SEQ ID NO: 14726 - RNA, 38 nt, Artificial Sequence
  Description of Artificial Sequence:  Enzymatic Nucleic Acid
  misc_feature (31)..(31): n stands for inosine
aaagccgccugaugaggccguuaggccgaanccaggag

SEQ ID NO: 14727 - RNA, 38 nt, Artificial Sequence
  Description of Artificial Sequence:  Enzymatic Nucleic Acid
  misc_feature (31)..(31): n stands for inosine
uccacaaacugaugaggccguuaggccgaanccgcugc

SEQ ID NO: 14728 - RNA, 38 nt, Artificial Sequence
  Description of Artificial Sequence:  Enzymatic Nucleic Acid
  misc_feature (31)..(31): n stands for inosine
ggcuagugcugaugaggccguuaggccgaanucuucca

SEQ ID NO: 14729 - RNA, 38 nt, Artificial Sequence
  Description of Artificial Sequence:  Enzymatic Nucleic Acid
  misc_feature (31)..(31): n stands for inosine
cuggcuagcugaugaggccguuaggccgaanagucuuc

SEQ ID NO: 14730 - RNA, 38 nt, Artificial Sequence
  Description of Artificial Sequence:  Enzymatic Nucleic Acid
  misc_feature (31)..(31): n stands for inosine
uucuggcucugaugaggccguuaggccgaanugagucu

SEQ ID NO: 14731 - RNA, 38 nt, Artificial Sequence
  Description of Artificial Sequence:  Enzymatic Nucleic Acid
  misc_feature (31)..(31): n stands for inosine
ucucuucucugaugaggccguuaggccgaancuaguga

SEQ ID NO: 14732 - RNA, 38 nt, Artificial Sequence
  Description of Artificial Sequence:  Enzymatic Nucleic Acid
  misc_feature (31)..(31): n stands for inosine
cucucuuccugaugaggccguuaggccgaangcuagug

SEQ ID NO: 14733 - RNA, 38 nt, Artificial Sequence
  Description of Artificial Sequence:  Enzymatic Nucleic Acid
  misc_feature (31)..(31): n stands for inosine
gagaggaccugaugaggccguuaggccgaanucccacu

SEQ ID NO: 14734 - RNA, 38 nt, Artificial Sequence
  Description of Artificial Sequence:  Enzymatic Nucleic Acid
  misc_feature (31)..(31): n stands for inosine
gguggagacugaugaggccguuaggccgaanacugucc

SEQ ID NO: 14735 - RNA, 38 nt, Artificial Sequence
  Description of Artificial Sequence:  Enzymatic Nucleic Acid
  misc_feature (31)..(31): n stands for inosine
ugguggagcugaugaggccguuaggccgaangacuguc

SEQ ID NO: 14736 - RNA, 38 nt, Artificial Sequence
  Description of Artificial Sequence:  Enzymatic Nucleic Acid
  misc_feature (31)..(31): n stands for inosine
cuugguggcugaugaggccguuaggccgaanaggacug

SEQ ID NO: 14737 - RNA, 38 nt, Artificial Sequence
  Description of Artificial Sequence:  Enzymatic Nucleic Acid
  misc_feature (31)..(31): n stands for inosine
aucuuggucugaugaggccguuaggccgaanagaggac

SEQ ID NO: 14738 - RNA, 38 nt, Artificial Sequence
  Description of Artificial Sequence:  Enzymatic Nucleic Acid
  misc_feature (31)..(31): n stands for inosine
gaucuuggcugaugaggccguuaggccgaangagagga

SEQ ID NO: 14739 - RNA, 38 nt, Artificial Sequence
  Description of Artificial Sequence:  Enzymatic Nucleic Acid
  misc_feature (31)..(31): n stands for inosine
uagaucuucugaugaggccguuaggccgaanuggagag

SEQ ID NO: 14740 - RNA, 38 nt, Artificial Sequence
  Description of Artificial Sequence:  Enzymatic Nucleic Acid
  misc_feature (31)..(31): n stands for inosine
uuagaucucugaugaggccguuaggccgaanguggaga

SEQ ID NO: 14741 - RNA, 38 nt, Artificial Sequence
  Description of Artificial Sequence:  Enzymatic Nucleic Acid
  misc_feature (31)..(31): n stands for inosine
uuggauuucugaugaggccguuaggccgaanaucuugg

SEQ ID NO: 14742 - RNA, 38 nt, Artificial Sequence
  Description of Artificial Sequence:  Enzymatic Nucleic Acid
  misc_feature (31)..(31): n stands for inosine
uuuuguuucugaugaggccguuaggccgaanauuuaga

SEQ ID NO: 14743 - RNA, 38 nt, Artificial Sequence
  Description of Artificial Sequence:  Enzymatic Nucleic Acid
  misc_feature (31)..(31): n stands for inosine
cuuuuguucugaugaggccguuaggccgaangauuuag

SEQ ID NO: 14744 - RNA, 38 nt, Artificial Sequence
  Description of Artificial Sequence:  Enzymatic Nucleic Acid
  misc_feature (31)..(31): n stands for inosine
ccugcuuucugaugaggccguuaggccgaanuuuggau

SEQ ID NO: 14745 - RNA, 38 nt, Artificial Sequence
  Description of Artificial Sequence:  Enzymatic Nucleic Acid
  misc_feature (31)..(31): n stands for inosine
cucuagcccugaugaggccguuaggccgaancuuuugu

SEQ ID NO: 14746 - RNA, 38 nt, Artificial Sequence
  Description of Artificial Sequence:  Enzymatic Nucleic Acid
  misc_feature (31)..(31): n stands for inosine
cuggcucucugaugaggccguuaggccgaanccugcuu

SEQ ID NO: 14747 - RNA, 38 nt, Artificial Sequence
  Description of Artificial Sequence:  Enzymatic Nucleic Acid
  misc_feature (31)..(31): n stands for inosine
ucucuucucugaugaggccguuaggccgaancucuagc

SEQ ID NO: 14748 - RNA, 38 nt, Artificial Sequence
  Description of Artificial Sequence:  Enzymatic Nucleic Acid
  misc_feature (31)..(31): n stands for inosine
cucucuuccugaugaggccguuaggccgaangcucuag

SEQ ID NO: 14749 - RNA, 38 nt, Artificial Sequence
  Description of Artificial Sequence:  Enzymatic Nucleic Acid
  misc_feature (31)..(31): n stands for inosine
caaagauucugaugaggccguuaggccgaanuccucuc

SEQ ID NO: 14750 - RNA, 38 nt, Artificial Sequence
  Description of Artificial Sequence:  Enzymatic Nucleic Acid
  misc_feature (31)..(31): n stands for inosine
aacaacaacugaugaggccguuaggccgaanauuuguc

SEQ ID NO: 14751 - RNA, 38 nt, Artificial Sequence
  Description of Artificial Sequence:  Enzymatic Nucleic Acid
  misc_feature (31)..(31): n stands for inosine
aaagaagacugaugaggccguuaggccgaanaacaaca

SEQ ID NO: 14752 - RNA, 38 nt, Artificial Sequence
  Description of Artificial Sequence:  Enzymatic Nucleic Acid
  misc_feature (31)..(31): n stands for inosine
uaaagaagcugaugaggccguuaggccgaangaacaac

SEQ ID NO: 14753 - RNA, 38 nt, Artificial Sequence
  Description of Artificial Sequence:  Enzymatic Nucleic Acid
  misc_feature (31)..(31): n stands for inosine
uguaaagacugaugaggccguuaggccgaanaggaaca

SEQ ID NO: 14754 - RNA, 38 nt, Artificial Sequence
  Description of Artificial Sequence:  Enzymatic Nucleic Acid
  misc_feature (31)..(31): n stands for inosine
auguguaacugaugaggccguuaggccgaanaagagga

SEQ ID NO: 14755 - RNA, 38 nt, Artificial Sequence
  Description of Artificial Sequence:  Enzymatic Nucleic Acid
  misc_feature (31)..(31): n stands for inosine
ugcguaugcugaugaggccguuaggccgaanuaaagaa

SEQ ID NO: 14756 - RNA, 38 nt, Artificial Sequence
  Description of Artificial Sequence:  Enzymatic Nucleic Acid
  misc_feature (31)..(31): n stands for inosine
uuugcguacugaugaggccguuaggccgaanuguaaag

SEQ ID NO: 14757 - RNA, 38 nt, Artificial Sequence
  Description of Artificial Sequence:  Enzymatic Nucleic Acid
  misc_feature (31)..(31): n stands for inosine
aggugguucugaugaggccguuaggccgaancguaugu

SEQ ID NO: 14758 - RNA, 38 nt, Artificial Sequence
  Description of Artificial Sequence:  Enzymatic Nucleic Acid
  misc_feature (31)..(31): n stands for inosine
ucacaggucugaugaggccguuaggccgaanuuugcgu

SEQ ID NO: 14759 - RNA, 38 nt, Artificial Sequence
  Description of Artificial Sequence:  Enzymatic Nucleic Acid
  misc_feature (31)..(31): n stands for inosine
gucacaggcugaugaggccguuaggccgaanguuugcg

SEQ ID NO: 14760 - RNA, 38 nt, Artificial Sequence
  Description of Artificial Sequence:  Enzymatic Nucleic Acid
  misc_feature (31)..(31): n stands for inosine
cugucacacugaugaggccguuaggccgaanugguuug

SEQ ID NO: 14761 - RNA, 38 nt, Artificial Sequence
  Description of Artificial Sequence:  Enzymatic Nucleic Acid
  misc_feature (31)..(31): n stands for inosine
gcugucaccugaugaggccguuaggccgaangugguuu

SEQ ID NO: 14762 - RNA, 38 nt, Artificial Sequence
  Description of Artificial Sequence:  Enzymatic Nucleic Acid
  misc_feature (31)..(31): n stands for inosine
uugccagccugaugaggccguuaggccgaanucacagg

SEQ ID NO: 14763 - RNA, 38 nt, Artificial Sequence
  Description of Artificial Sequence:  Enzymatic Nucleic Acid
  misc_feature (31)..(31): n stands for inosine
aaauugcccugaugaggccguuaggccgaancugucac

SEQ ID NO: 14764 - RNA, 38 nt, Artificial Sequence
  Description of Artificial Sequence:  Enzymatic Nucleic Acid
  misc_feature (31)..(31): n stands for inosine
uauaaaaucugaugaggccguuaggccgaanccagcug

SEQ ID NO: 14765 - RNA, 38 nt, Artificial Sequence
  Description of Artificial Sequence:  Enzymatic Nucleic Acid
  misc_feature (31)..(31): n stands for inosine
caguuacccugaugaggccguuaggccgaanauuuaua

SEQ ID NO: 14766 - RNA, 38 nt, Artificial Sequence
  Description of Artificial Sequence:  Enzymatic Nucleic Acid
  misc_feature (31)..(31): n stands for inosine
cuccuucccugaugaggccguuaggccgaanuuaccug

SEQ ID NO: 14767 - RNA, 38 nt, Artificial Sequence
  Description of Artificial Sequence:  Enzymatic Nucleic Acid
  misc_feature (31)..(31): n stands for inosine
uuuuucugcugaugaggccguuaggccgaanuuuaacc

SEQ ID NO: 14768 - RNA, 38 nt, Artificial Sequence
  Description of Artificial Sequence:  Enzymatic Nucleic Acid
  misc_feature (31)..(31): n stands for inosine
cuuuuuuccugaugaggccguuaggccgaanaguuuaa

SEQ ID NO: 14769 - RNA, 38 nt, Artificial Sequence
  Description of Artificial Sequence:  Enzymatic Nucleic Acid
  misc_feature (31)..(31): n stands for inosine
uugacugacugaugaggccguuaggccgaanucuucuu

SEQ ID NO: 14770 - RNA, 38 nt, Artificial Sequence
  Description of Artificial Sequence:  Enzymatic Nucleic Acid
  misc_feature (31)..(31): n stands for inosine
auugacugcugaugaggccguuaggccgaangucuucu

SEQ ID NO: 14771 - RNA, 38 nt, Artificial Sequence
  Description of Artificial Sequence:  Enzymatic Nucleic Acid
  misc_feature (31)..(31): n stands for inosine
gaauugaccugaugaggccguuaggccgaanaggucuu

SEQ ID NO: 14772 - RNA, 38 nt, Artificial Sequence
  Description of Artificial Sequence:  Enzymatic Nucleic Acid
  misc_feature (31)..(31): n stands for inosine
uagagaaucugaugaggccguuaggccgaanacugagg

SEQ ID NO: 14773 - RNA, 38 nt, Artificial Sequence
  Description of Artificial Sequence:  Enzymatic Nucleic Acid
  misc_feature (31)..(31): n stands for inosine
aaaaguagcugaugaggccguuaggccgaanaauugac

SEQ ID NO: 14774 - RNA, 38 nt, Artificial Sequence
  Description of Artificial Sequence:  Enzymatic Nucleic Acid
  misc_feature (31)..(31): n stands for inosine
aaaaaagucugaugaggccguuaggccgaanagaauug

SEQ ID NO: 14775 - RNA, 38 nt, Artificial Sequence
  Description of Artificial Sequence:  Enzymatic Nucleic Acid
  misc_feature (31)..(31): n stands for inosine
aaaaaaaacugaugaggccguuaggccgaanuagagaa

SEQ ID NO: 14776 - RNA, 38 nt, Artificial Sequence
  Description of Artificial Sequence:  Enzymatic Nucleic Acid
  misc_feature (31)..(31): n stands for inosine
ucugauuucugaugaggccguuaggccgaanaaaaaaa

SEQ ID NO: 14777 - RNA, 38 nt, Artificial Sequence
  Description of Artificial Sequence:  Enzymatic Nucleic Acid
  misc_feature (31)..(31): n stands for inosine
aucugauucugaugaggccguuaggccgaangaaaaaa

SEQ ID NO: 14778 - RNA, 38 nt, Artificial Sequence
  Description of Artificial Sequence:  Enzymatic Nucleic Acid
  misc_feature (31)..(31): n stands for inosine
cuauuauccugaugaggccguuaggccgaanauuugga

SEQ ID NO: 14779 - RNA, 38 nt, Artificial Sequence
  Description of Artificial Sequence:  Enzymatic Nucleic Acid
  misc_feature (31)..(31): n stands for inosine
auuugcugcugaugaggccguuaggccgaancuauuau

SEQ ID NO: 14780 - RNA, 38 nt, Artificial Sequence
  Description of Artificial Sequence:  Enzymatic Nucleic Acid
  misc_feature (31)..(31): n stands for inosine
uauuugcucugaugaggccguuaggccgaangcuauua

SEQ ID NO: 14781 - RNA, 38 nt, Artificial Sequence
  Description of Artificial Sequence:  Enzymatic Nucleic Acid
  misc_feature (31)..(31): n stands for inosine
cuauuugccugaugaggccguuaggccgaanggcuauu

SEQ ID NO: 14782 - RNA, 38 nt, Artificial Sequence
  Description of Artificial Sequence:  Enzymatic Nucleic Acid
  misc_feature (31)..(31): n stands for inosine
ucacuauucugaugaggccguuaggccgaancugggcu

SEQ ID NO: 14783 - RNA, 38 nt, Artificial Sequence
  Description of Artificial Sequence:  Enzymatic Nucleic Acid
  misc_feature (31)..(31): n stands for inosine
guuuuauucugaugaggccguuaggccgaanuuaucac

SEQ ID NO: 14784 - RNA, 38 nt, Artificial Sequence
  Description of Artificial Sequence:  Enzymatic Nucleic Acid
  misc_feature (31)..(31): n stands for inosine
acagcuaacugaugaggccguuaggccgaanuuuuauu

SEQ ID NO: 14785 - RNA, 38 nt, Artificial Sequence
  Description of Artificial Sequence:  Enzymatic Nucleic Acid
  misc_feature (31)..(31): n stands for inosine
aacagcuacugaugaggccguuaggccgaanguuuuau

SEQ ID NO: 14786 - RNA, 38 nt, Artificial Sequence
  Description of Artificial Sequence:  Enzymatic Nucleic Acid
  misc_feature (31)..(31): n stands for inosine
acaugaaccugaugaggccguuaggccgaancuaaggu

SEQ ID NO: 14787 - RNA, 38 nt, Artificial Sequence
  Description of Artificial Sequence:  Enzymatic Nucleic Acid
  misc_feature (31)..(31): n stands for inosine
ucaagacacugaugaggccguuaggccgaanaacagcu

SEQ ID NO: 14788 - RNA, 38 nt, Artificial Sequence
  Description of Artificial Sequence:  Enzymatic Nucleic Acid
  misc_feature (31)..(31): n stands for inosine
ugaaaucacugaugaggccguuaggccgaanacaugaa

SEQ ID NO: 14789 - RNA, 38 nt, Artificial Sequence
  Description of Artificial Sequence:  Enzymatic Nucleic Acid
  misc_feature (31)..(31): n stands for inosine
uuaauuaucugaugaggccguuaggccgaanaaaucaa

SEQ ID NO: 14790 - RNA, 38 nt, Artificial Sequence
  Description of Artificial Sequence:  Enzymatic Nucleic Acid
  misc_feature (31)..(31): n stands for inosine
aaugauuacugaugaggccguuaggccgaanaauuaau

SEQ ID NO: 14791 - RNA, 38 nt, Artificial Sequence
  Description of Artificial Sequence:  Enzymatic Nucleic Acid
  misc_feature (31)..(31): n stands for inosine
ucucuuaacugaugaggccguuaggccgaanauuaaga

SEQ ID NO: 14792 - RNA, 38 nt, Artificial Sequence
  Description of Artificial Sequence:  Enzymatic Nucleic Acid
  misc_feature (31)..(31): n stands for inosine
uuuauuaucugaugaggccguuaggccgaanucucuua

SEQ ID NO: 14793 - RNA, 38 nt, Artificial Sequence
  Description of Artificial Sequence:  Enzymatic Nucleic Acid
  misc_feature (31)..(31): n stands for inosine
auuuauuacugaugaggccguuaggccgaangucucuu

SEQ ID NO: 14794 - RNA, 38 nt, Artificial Sequence
  Description of Artificial Sequence:  Enzymatic Nucleic Acid
  misc_feature (31)..(31): n stands for inosine
ugaaaaggcugaugaggccguuaggccgaanuauuuau

SEQ ID NO: 14795 - RNA, 38 nt, Artificial Sequence
  Description of Artificial Sequence:  Enzymatic Nucleic Acid
  misc_feature (31)..(31): n stands for inosine
cuugaaaacugaugaggccguuaggccgaanaguauuu

SEQ ID NO: 14796 - RNA, 38 nt, Artificial Sequence
  Description of Artificial Sequence:  Enzymatic Nucleic Acid
  misc_feature (31)..(31): n stands for inosine
ucuugaaacugaugaggccguuaggccgaangaguauu

SEQ ID NO: 14797 - RNA, 38 nt, Artificial Sequence
  Description of Artificial Sequence:  Enzymatic Nucleic Acid
  misc_feature (31)..(31): n stands for inosine
uuuucucucugaugaggccguuaggccgaanaaaagga

SEQ ID NO: 14798 - RNA, 38 nt, Artificial Sequence
  Description of Artificial Sequence:  Enzymatic Nucleic Acid
  misc_feature (31)..(31): n stands for inosine
aaugguuucugaugaggccguuaggccgaancuuuucu

SEQ ID NO: 14799 - RNA, 38 nt, Artificial Sequence
  Description of Artificial Sequence:  Enzymatic Nucleic Acid
  misc_feature (31)..(31): n stands for inosine
auucuaaucugaugaggccguuaggccgaanuuuugcu

SEQ ID NO: 14800 - RNA, 38 nt, Artificial Sequence
  Description of Artificial Sequence:  Enzymatic Nucleic Acid
  misc_feature (31)..(31): n stands for inosine
aauucuaacugaugaggccguuaggccgaanguuuugc

SEQ ID NO: 14801 - RNA, 38 nt, Artificial Sequence
  Description of Artificial Sequence:  Enzymatic Nucleic Acid
  misc_feature (31)..(31): n stands for inosine
aggagcugcugaugaggccguuaggccgaanuaacaau

SEQ ID NO: 14802 - RNA, 38 nt, Artificial Sequence
  Description of Artificial Sequence:  Enzymatic Nucleic Acid
  misc_feature (31)..(31): n stands for inosine
gaaggagccugaugaggccguuaggccgaanaguaaca

SEQ ID NO: 14803 - RNA, 38 nt, Artificial Sequence
  Description of Artificial Sequence:  Enzymatic Nucleic Acid
  misc_feature (31)..(31): n stands for inosine
uuugaaggcugaugaggccguuaggccgaancugagua

SEQ ID NO: 14804 - RNA, 38 nt, Artificial Sequence
  Description of Artificial Sequence:  Enzymatic Nucleic Acid
  misc_feature (31)..(31): n stands for inosine
aguuugaacugaugaggccguuaggccgaanagcugag

SEQ ID NO: 14805 - RNA, 38 nt, Artificial Sequence
  Description of Artificial Sequence:  Enzymatic Nucleic Acid
  misc_feature (31)..(31): n stands for inosine
gaguuugacugaugaggccguuaggccgaangagcuga

SEQ ID NO: 14806 - RNA, 38 nt, Artificial Sequence
  Description of Artificial Sequence:  Enzymatic Nucleic Acid
  misc_feature (31)..(31): n stands for inosine
ccugaguucugaugaggccguuaggccgaanaaggagc

SEQ ID NO: 14807 - RNA, 38 nt, Artificial Sequence
  Description of Artificial Sequence:  Enzymatic Nucleic Acid
  misc_feature (31)..(31): n stands for inosine
caaaccugcugaugaggccguuaggccgaanuuugaag

SEQ ID NO: 14808 - RNA, 38 nt, Artificial Sequence
  Description of Artificial Sequence:  Enzymatic Nucleic Acid
  misc_feature (31)..(31): n stands for inosine
uacaaacccugaugaggccguuaggccgaanaguuuga

SEQ ID NO: 14809 - RNA, 38 nt, Artificial Sequence
  Description of Artificial Sequence:  Enzymatic Nucleic Acid
  misc_feature (31)..(31): n stands for inosine
cucauguacugaugaggccguuaggccgaancuacaaa

SEQ ID NO: 14810 - RNA, 38 nt, Artificial Sequence
  Description of Artificial Sequence:  Enzymatic Nucleic Acid
  misc_feature (31)..(31): n stands for inosine
uggacucacugaugaggccguuaggccgaanuaugcua

SEQ ID NO: 14811 - RNA, 38 nt, Artificial Sequence
  Description of Artificial Sequence:  Enzymatic Nucleic Acid
  misc_feature (31)..(31): n stands for inosine
ugauggaucugaugaggccguuaggccgaanacucaug

SEQ ID NO: 14812 - RNA, 38 nt, Artificial Sequence
  Description of Artificial Sequence:  Enzymatic Nucleic Acid
  misc_feature (31)..(31): n stands for inosine
cugauggacugaugaggccguuaggccgaangacucau

SEQ ID NO: 14813 - RNA, 38 nt, Artificial Sequence
  Description of Artificial Sequence:  Enzymatic Nucleic Acid
  misc_feature (31)..(31): n stands for inosine
ugacugaucugaugaggccguuaggccgaanauggacu

SEQ ID NO: 14814 - RNA, 38 nt, Artificial Sequence
  Description of Artificial Sequence:  Enzymatic Nucleic Acid
  misc_feature (31)..(31): n stands for inosine
uugacugacugaugaggccguuaggccgaangauggac

SEQ ID NO: 14815 - RNA, 38 nt, Artificial Sequence
  Description of Artificial Sequence:  Enzymatic Nucleic Acid
  misc_feature (31)..(31): n stands for inosine
ucuuugaccugaugaggccguuaggccgaanauggaug

SEQ ID NO: 14816 - RNA, 38 nt, Artificial Sequence
  Description of Artificial Sequence:  Enzymatic Nucleic Acid
  misc_feature (31)..(31): n stands for inosine
ccauucuucugaugaggccguuaggccgaanacugaug

SEQ ID NO: 14817 - RNA, 38 nt, Artificial Sequence
  Description of Artificial Sequence:  Enzymatic Nucleic Acid
  misc_feature (31)..(31): n stands for inosine
cuccagaucugaugaggccguuaggccgaanaaccauu

SEQ ID NO: 14818 - RNA, 38 nt, Artificial Sequence
  Description of Artificial Sequence:  Enzymatic Nucleic Acid
  misc_feature (31)..(31): n stands for inosine
acuccagacugaugaggccguuaggccgaangaaccau

SEQ ID NO: 14819 - RNA, 38 nt, Artificial Sequence
  Description of Artificial Sequence:  Enzymatic Nucleic Acid
  misc_feature (31)..(31): n stands for inosine
aagacucccugaugaggccguuaggccgaanauggaac

SEQ ID NO: 14820 - RNA, 38 nt, Artificial Sequence
  Description of Artificial Sequence:  Enzymatic Nucleic Acid
  misc_feature (31)..(31): n stands for inosine
cuacauuacugaugaggccguuaggccgaanacuccag

SEQ ID NO: 14821 - RNA, 38 nt, Artificial Sequence
  Description of Artificial Sequence:  Enzymatic Nucleic Acid
  misc_feature (31)..(31): n stands for inosine
uuauuacacugaugaggccguuaggccgaanucuccau

SEQ ID NO: 14822 - RNA, 38 nt, Artificial Sequence
  Description of Artificial Sequence:  Enzymatic Nucleic Acid
  misc_feature (31)..(31): n stands for inosine
uuguaacucugaugaggccguuaggccgaancucauua

SEQ ID NO: 14823 - RNA, 38 nt, Artificial Sequence
  Description of Artificial Sequence:  Enzymatic Nucleic Acid
  misc_feature (31)..(31): n stands for inosine
aagcacuucugaugaggccguuaggccgaanuaacuag

SEQ ID NO: 14824 - RNA, 38 nt, Artificial Sequence
  Description of Artificial Sequence:  Enzymatic Nucleic Acid
  misc_feature (31)..(31): n stands for inosine
aaugaacacugaugaggccguuaggccgaancacuuug

SEQ ID NO: 14825 - RNA, 38 nt, Artificial Sequence
  Description of Artificial Sequence:  Enzymatic Nucleic Acid
  misc_feature (31)..(31): n stands for inosine
uauuuuaacugaugaggccguuaggccgaanaacaagc

SEQ ID NO: 14826 - RNA, 38 nt, Artificial Sequence
  Description of Artificial Sequence:  Enzymatic Nucleic Acid
  misc_feature (31)..(31): n stands for inosine
auuuucagcugaugaggccguuaggccgaancuauuuu

SEQ ID NO: 14827 - RNA, 38 nt, Artificial Sequence
  Description of Artificial Sequence:  Enzymatic Nucleic Acid
  misc_feature (31)..(31): n stands for inosine
caauuuuccugaugaggccguuaggccgaanugcuauu

SEQ ID NO: 14828 - RNA, 38 nt, Artificial Sequence
  Description of Artificial Sequence:  Enzymatic Nucleic Acid
  misc_feature (31)..(31): n stands for inosine
uuaauucacugaugaggccguuaggccgaanuuucaau

SEQ ID NO: 14829 - RNA, 38 nt, Artificial Sequence
  Description of Artificial Sequence:  Enzymatic Nucleic Acid
  misc_feature (31)..(31): n stands for inosine
auauuauccugaugaggccguuaggccgaanuuaauuc

SEQ ID NO: 14830 - RNA, 38 nt, Artificial Sequence
  Description of Artificial Sequence:  Enzymatic Nucleic Acid
  misc_feature (31)..(31): n stands for inosine
aaaugauucugaugaggccguuaggccgaanaauauua

SEQ ID NO: 14831 - RNA, 38 nt, Artificial Sequence
  Description of Artificial Sequence:  Enzymatic Nucleic Acid
  misc_feature (31)..(31): n stands for inosine
caaaugaucugaugaggccguuaggccgaangaauauu

SEQ ID NO: 14832 - RNA, 38 nt, Artificial Sequence
  Description of Artificial Sequence:  Enzymatic Nucleic Acid
  misc_feature (31)..(31): n stands for inosine
auggcaaacugaugaggccguuaggccgaanauuggaa

SEQ ID NO: 14833 - RNA, 38 nt, Artificial Sequence
  Description of Artificial Sequence:  Enzymatic Nucleic Acid
  misc_feature (31)..(31): n stands for inosine
ucauaaaucugaugaggccguuaggccgaancaaauga

SEQ ID NO: 14834 - RNA, 38 nt, Artificial Sequence
  Description of Artificial Sequence:  Enzymatic Nucleic Acid
  misc_feature (31)..(31): n stands for inosine
gucauaaacugaugaggccguuaggccgaangcaaaug

SEQ ID NO: 14835 - RNA, 38 nt, Artificial Sequence
  Description of Artificial Sequence:  Enzymatic Nucleic Acid
  misc_feature (31)..(31): n stands for inosine
accauuuucugaugaggccguuaggccgaanucauaaa

SEQ ID NO: 14836 - RNA, 38 nt, Artificial Sequence
  Description of Artificial Sequence:  Enzymatic Nucleic Acid
  misc_feature (31)..(31): n stands for inosine
uuuguuagcugaugaggccguuaggccgaanccaacca

SEQ ID NO: 14837 - RNA, 38 nt, Artificial Sequence
  Description of Artificial Sequence:  Enzymatic Nucleic Acid
  misc_feature (31)..(31): n stands for inosine
ucuuuguucugaugaggccguuaggccgaanugccaac

SEQ ID NO: 14838 - RNA, 38 nt, Artificial Sequence
  Description of Artificial Sequence:  Enzymatic Nucleic Acid
  misc_feature (31)..(31): n stands for inosine
ucguucuucugaugaggccguuaggccgaanuuagugc

SEQ ID NO: 14839 - RNA, 38 nt, Artificial Sequence
  Description of Artificial Sequence:  Enzymatic Nucleic Acid
  misc_feature (31)..(31): n stands for inosine
aaaggaagcugaugaggccguuaggccgaancucguuc

SEQ ID NO: 14840 - RNA, 38 nt, Artificial Sequence
  Description of Artificial Sequence:  Enzymatic Nucleic Acid
  misc_feature (31)..(31): n stands for inosine
ugaaaggacugaugaggccguuaggccgaanugcucgu

SEQ ID NO: 14841 - RNA, 38 nt, Artificial Sequence
  Description of Artificial Sequence:  Enzymatic Nucleic Acid
  misc_feature (31)..(31): n stands for inosine
cucugaaacugaugaggccguuaggccgaanaagugcu

SEQ ID NO: 14842 - RNA, 38 nt, Artificial Sequence
  Description of Artificial Sequence:  Enzymatic Nucleic Acid
  misc_feature (31)..(31): n stands for inosine
acucugaacugaugaggccguuaggccgaangaagugc

SEQ ID NO: 14843 - RNA, 38 nt, Artificial Sequence
  Description of Artificial Sequence:  Enzymatic Nucleic Acid
  misc_feature (31)..(31): n stands for inosine
agaaacuccugaugaggccguuaggccgaanaaaggaa

SEQ ID NO: 14844 - RNA, 38 nt, Artificial Sequence
  Description of Artificial Sequence:  Enzymatic Nucleic Acid
  misc_feature (31)..(31): n stands for inosine
auuaucuccugaugaggccguuaggccgaanaaacucu

SEQ ID NO: 14845 - RNA, 38 nt, Artificial Sequence
  Description of Artificial Sequence:  Enzymatic Nucleic Acid
  misc_feature (31)..(31): n stands for inosine
acccagaccugaugaggccguuaggccgaanuuccacg

SEQ ID NO: 14846 - RNA, 38 nt, Artificial Sequence
  Description of Artificial Sequence:  Enzymatic Nucleic Acid
  misc_feature (31)..(31): n stands for inosine
uuccaccccugaugaggccguuaggccgaanacuguuc

SEQ ID NO: 14847 - RNA, 38 nt, Artificial Sequence
  Description of Artificial Sequence:  Enzymatic Nucleic Acid
  misc_feature (31)..(31): n stands for inosine
augguuuccugaugaggccguuaggccgaanccccauu

SEQ ID NO: 14848 - RNA, 38 nt, Artificial Sequence
  Description of Artificial Sequence:  Enzymatic Nucleic Acid
  misc_feature (31)..(31): n stands for inosine
uugcacaucugaugaggccguuaggccgaanuuucagc

SEQ ID NO: 14849 - RNA, 38 nt, Artificial Sequence
  Description of Artificial Sequence:  Enzymatic Nucleic Acid
  misc_feature (31)..(31): n stands for inosine
cuugcacacugaugaggccguuaggccgaanguuucag

SEQ ID NO: 14850 - RNA, 38 nt, Artificial Sequence
  Description of Artificial Sequence:  Enzymatic Nucleic Acid
  misc_feature (31)..(31): n stands for inosine
cacagacucugaugaggccguuaggccgaancacaugg

SEQ ID NO: 14851 - RNA, 38 nt, Artificial Sequence
  Description of Artificial Sequence:  Enzymatic Nucleic Acid
  misc_feature (31)..(31): n stands for inosine
caagacaccugaugaggccguuaggccgaanacuugca

SEQ ID NO: 14852 - RNA, 38 nt, Artificial Sequence
  Description of Artificial Sequence:  Enzymatic Nucleic Acid
  misc_feature (31)..(31): n stands for inosine
gacugacacugaugaggccguuaggccgaanacacaga

SEQ ID NO: 14853 - RNA, 38 nt, Artificial Sequence
  Description of Artificial Sequence:  Enzymatic Nucleic Acid
  misc_feature (31)..(31): n stands for inosine
ucuuggaccugaugaggccguuaggccgaanacaagac

SEQ ID NO: 14854 - RNA, 38 nt, Artificial Sequence
  Description of Artificial Sequence:  Enzymatic Nucleic Acid
  misc_feature (31)..(31): n stands for inosine
cacuucuucugaugaggccguuaggccgaanacugaca

SEQ ID NO: 14855 - RNA, 38 nt, Artificial Sequence
  Description of Artificial Sequence:  Enzymatic Nucleic Acid
  misc_feature (31)..(31): n stands for inosine
ucacuucucugaugaggccguuaggccgaangacugac

SEQ ID NO: 14856 - RNA, 38 nt, Artificial Sequence
  Description of Artificial Sequence:  Enzymatic Nucleic Acid
  misc_feature (31)..(31): n stands for inosine
caucucggcugaugaggccguuaggccgaanucacuuc

SEQ ID NO: 14857 - RNA, 38 nt, Artificial Sequence
  Description of Artificial Sequence:  Enzymatic Nucleic Acid
  misc_feature (31)..(31): n stands for inosine
aacaucuccugaugaggccguuaggccgaanugucacu

SEQ ID NO: 14858 - RNA, 38 nt, Artificial Sequence
  Description of Artificial Sequence:  Enzymatic Nucleic Acid
  misc_feature (31)..(31): n stands for inosine
aaggcacgcugaugaggccguuaggccgaanucccuaa

SEQ ID NO: 14859 - RNA, 38 nt, Artificial Sequence
  Description of Artificial Sequence:  Enzymatic Nucleic Acid
  misc_feature (31)..(31): n stands for inosine
caaggcaccugaugaggccguuaggccgaangucccua

SEQ ID NO: 14860 - RNA, 38 nt, Artificial Sequence
  Description of Artificial Sequence:  Enzymatic Nucleic Acid
  misc_feature (31)..(31): n stands for inosine
ggaaacaacugaugaggccguuaggccgaancacgggu

SEQ ID NO: 14861 - RNA, 38 nt, Artificial Sequence
  Description of Artificial Sequence:  Enzymatic Nucleic Acid
  misc_feature (31)..(31): n stands for inosine
aggaaacacugaugaggccguuaggccgaangcacggg

SEQ ID NO: 14862 - RNA, 38 nt, Artificial Sequence
  Description of Artificial Sequence:  Enzymatic Nucleic Acid
  misc_feature (31)..(31): n stands for inosine
gugggcuacugaugaggccguuaggccgaanaaacaag

SEQ ID NO: 14863 - RNA, 38 nt, Artificial Sequence
  Description of Artificial Sequence:  Enzymatic Nucleic Acid
  misc_feature (31)..(31): n stands for inosine
ugugggcucugaugaggccguuaggccgaangaaacaa

SEQ ID NO: 14864 - RNA, 38 nt, Artificial Sequence
  Description of Artificial Sequence:  Enzymatic Nucleic Acid
  misc_feature (31)..(31): n stands for inosine
uucuugugcugaugaggccguuaggccgaancuaggaa

SEQ ID NO: 14865 - RNA, 38 nt, Artificial Sequence
  Description of Artificial Sequence:  Enzymatic Nucleic Acid
  misc_feature (31)..(31): n stands for inosine
auucuugucugaugaggccguuaggccgaangcuagga

SEQ ID NO: 14866 - RNA, 38 nt, Artificial Sequence
  Description of Artificial Sequence:  Enzymatic Nucleic Acid
  misc_feature (31)..(31): n stands for inosine
cauucuugcugaugaggccguuaggccgaanggcuagg

SEQ ID NO: 14867 - RNA, 38 nt, Artificial Sequence
  Description of Artificial Sequence:  Enzymatic Nucleic Acid
  misc_feature (31)..(31): n stands for inosine
ugcauucucugaugaggccguuaggccgaanugggcua

SEQ ID NO: 14868 - RNA, 38 nt, Artificial Sequence
  Description of Artificial Sequence:  Enzymatic Nucleic Acid
  misc_feature (31)..(31): n stands for inosine
uugauguucugaugaggccguuaggccgaancauucuu

SEQ ID NO: 14869 - RNA, 38 nt, Artificial Sequence
  Description of Artificial Sequence:  Enzymatic Nucleic Acid
  misc_feature (31)..(31): n stands for inosine
cuguuugacugaugaggccguuaggccgaanuuugcau

SEQ ID NO: 14870 - RNA, 38 nt, Artificial Sequence
  Description of Artificial Sequence:  Enzymatic Nucleic Acid
  misc_feature (31)..(31): n stands for inosine
uaucuguucugaugaggccguuaggccgaanauguuug

SEQ ID NO: 14871 - RNA, 38 nt, Artificial Sequence
  Description of Artificial Sequence:  Enzymatic Nucleic Acid
  misc_feature (31)..(31): n stands for inosine
cgaguauccugaugaggccguuaggccgaanuuugaug

SEQ ID NO: 14872 - RNA, 38 nt, Artificial Sequence
  Description of Artificial Sequence:  Enzymatic Nucleic Acid
  misc_feature (31)..(31): n stands for inosine
ggcuagcgcugaugaggccguuaggccgaanuaucugu

SEQ ID NO: 14873 - RNA, 38 nt, Artificial Sequence
  Description of Artificial Sequence:  Enzymatic Nucleic Acid
  misc_feature (31)..(31): n stands for inosine
augaggcucugaugaggccguuaggccgaancgaguau

SEQ ID NO: 14874 - RNA, 38 nt, Artificial Sequence
  Description of Artificial Sequence:  Enzymatic Nucleic Acid
  misc_feature (31)..(31): n stands for inosine
uuaaaugacugaugaggccguuaggccgaancuagcga

SEQ ID NO: 14875 - RNA, 38 nt, Artificial Sequence
  Description of Artificial Sequence:  Enzymatic Nucleic Acid
  misc_feature (31)..(31): n stands for inosine
uuuaaaugcugaugaggccguuaggccgaangcuagcg

SEQ ID NO: 14876 - RNA, 38 nt, Artificial Sequence
  Description of Artificial Sequence:  Enzymatic Nucleic Acid
  misc_feature (31)..(31): n stands for inosine
aauuuaaacugaugaggccguuaggccgaanaggcuag

SEQ ID NO: 14877 - RNA, 38 nt, Artificial Sequence
  Description of Artificial Sequence:  Enzymatic Nucleic Acid
  misc_feature (31)..(31): n stands for inosine
gccaaagacugaugaggccguuaggccgaancacuccu

SEQ ID NO: 14878 - RNA, 38 nt, Artificial Sequence
  Description of Artificial Sequence:  Enzymatic Nucleic Acid
  misc_feature (31)..(31): n stands for inosine
ucggccaacugaugaggccguuaggccgaanaugcacu

SEQ ID NO: 14879 - RNA, 38 nt, Artificial Sequence
  Description of Artificial Sequence:  Enzymatic Nucleic Acid
  misc_feature (31)..(31): n stands for inosine
ccacuguccugaugaggccguuaggccgaanccaaaga

SEQ ID NO: 14880 - RNA, 38 nt, Artificial Sequence
  Description of Artificial Sequence:  Enzymatic Nucleic Acid
  misc_feature (31)..(31): n stands for inosine
uacaccaccugaugaggccguuaggccgaanucggcca

SEQ ID NO: 14881 - RNA, 38 nt, Artificial Sequence
  Description of Artificial Sequence:  Enzymatic Nucleic Acid
  misc_feature (31)..(31): n stands for inosine
acacacaccugaugaggccguuaggccgaanuuacacc

SEQ ID NO: 14882 - RNA, 38 nt, Artificial Sequence
  Description of Artificial Sequence:  Enzymatic Nucleic Acid
  misc_feature (31)..(31): n stands for inosine
aauaguuacugaugaggccguuaggccgaancacaaaa

SEQ ID NO: 14883 - RNA, 38 nt, Artificial Sequence
  Description of Artificial Sequence:  Enzymatic Nucleic Acid
  misc_feature (31)..(31): n stands for inosine
ccuuaaaucugaugaggccguuaggccgaanuuaugca

SEQ ID NO: 14884 - RNA, 38 nt, Artificial Sequence
  Description of Artificial Sequence:  Enzymatic Nucleic Acid
  misc_feature (31)..(31): n stands for inosine
aaaauucccugaugaggccguuaggccgaanuuuccuu

SEQ ID NO: 14885 - RNA, 38 nt, Artificial Sequence
  Description of Artificial Sequence:  Enzymatic Nucleic Acid
  misc_feature (31)..(31): n stands for inosine
uguauaaacugaugaggccguuaggccgaanuaacuuu

SEQ ID NO: 14886 - RNA, 38 nt, Artificial Sequence
  Description of Artificial Sequence:  Enzymatic Nucleic Acid
  misc_feature (31)..(31): n stands for inosine
ucuugguucugaugaggccguuaggccgaanuauaaaa

SEQ ID NO: 14887 - RNA, 38 nt, Artificial Sequence
  Description of Artificial Sequence:  Enzymatic Nucleic Acid
  misc_feature (31)..(31): n stands for inosine
auauucuucugaugaggccguuaggccgaanuuuguau

SEQ ID NO: 14888 - RNA, 38 nt, Artificial Sequence
  Description of Artificial Sequence:  Enzymatic Nucleic Acid
  misc_feature (31)..(31): n stands for inosine
uauauucucugaugaggccguuaggccgaanguuugua

SEQ ID NO: 14889 - RNA, 38 nt, Artificial Sequence
  Description of Artificial Sequence:  Enzymatic Nucleic Acid
  misc_feature (31)..(31): n stands for inosine
auaucugucugaugaggccguuaggccgaancauauau

SEQ ID NO: 14890 - RNA, 38 nt, Artificial Sequence
  Description of Artificial Sequence:  Enzymatic Nucleic Acid
  misc_feature (31)..(31): n stands for inosine
cuuauauccugaugaggccguuaggccgaanuagcaua

SEQ ID NO: 14891 - RNA, 38 nt, Artificial Sequence
  Description of Artificial Sequence:  Enzymatic Nucleic Acid
  misc_feature (31)..(31): n stands for inosine
accauguccugaugaggccguuaggccgaanucuuaua

SEQ ID NO: 14892 - RNA, 38 nt, Artificial Sequence
  Description of Artificial Sequence:  Enzymatic Nucleic Acid
  misc_feature (31)..(31): n stands for inosine
ccaaaccacugaugaggccguuaggccgaanucugucu

SEQ ID NO: 14893 - RNA, 38 nt, Artificial Sequence
  Description of Artificial Sequence:  Enzymatic Nucleic Acid
  misc_feature (31)..(31): n stands for inosine
gaaauauacugaugaggccguuaggccgaanaccaaac

SEQ ID NO: 14894 - RNA, 38 nt, Artificial Sequence
  Description of Artificial Sequence:  Enzymatic Nucleic Acid
  misc_feature (31)..(31): n stands for inosine
agaaauaucugaugaggccguuaggccgaangaccaaa

SEQ ID NO: 14895 - RNA, 38 nt, Artificial Sequence
  Description of Artificial Sequence:  Enzymatic Nucleic Acid
  misc_feature (31)..(31): n stands for inosine
ucaugacucugaugaggccguuaggccgaanaaauaua

SEQ ID NO: 14896 - RNA, 38 nt, Artificial Sequence
  Description of Artificial Sequence:  Enzymatic Nucleic Acid
  misc_feature (31)..(31): n stands for inosine
auucaucacugaugaggccguuaggccgaanacuagaa

SEQ ID NO: 14897 - RNA, 38 nt, Artificial Sequence
  Description of Artificial Sequence:  Enzymatic Nucleic Acid
  misc_feature (31)..(31): n stands for inosine
augaagaucugaugaggccguuaggccgaanuauacaa

SEQ ID NO: 14898 - RNA, 38 nt, Artificial Sequence
  Description of Artificial Sequence:  Enzymatic Nucleic Acid
  misc_feature (31)..(31): n stands for inosine
uaugaagacugaugaggccguuaggccgaanguauaca

SEQ ID NO: 14899 - RNA, 38 nt, Artificial Sequence
  Description of Artificial Sequence:  Enzymatic Nucleic Acid
  misc_feature (31)..(31): n stands for inosine
uuauaugacugaugaggccguuaggccgaanaugguau

SEQ ID NO: 14900 - RNA, 38 nt, Artificial Sequence
  Description of Artificial Sequence:  Enzymatic Nucleic Acid
  misc_feature (31)..(31): n stands for inosine
auauuauacugaugaggccguuaggccgaanaagaugg

SEQ ID NO: 14901 - RNA, 38 nt, Artificial Sequence
  Description of Artificial Sequence:  Enzymatic Nucleic Acid
  misc_feature (31)..(31): n stands for inosine
uauuuuuacugaugaggccguuaggccgaanuauauua

SEQ ID NO: 14902 - RNA, 38 nt, Artificial Sequence
  Description of Artificial Sequence:  Enzymatic Nucleic Acid
  misc_feature (31)..(31): n stands for inosine
cccaauuacugaugaggccguuaggccgaanaaauauu

SEQ ID NO: 14903 - RNA, 38 nt, Artificial Sequence
  Description of Artificial Sequence:  Enzymatic Nucleic Acid
  misc_feature (31)..(31): n stands for inosine
auuaaguucugaugaggccguuaggccgaanuacgauu

SEQ ID NO: 14904 - RNA, 38 nt, Artificial Sequence
  Description of Artificial Sequence:  Enzymatic Nucleic Acid
  misc_feature (31)..(31): n stands for inosine
aauuaagucugaugaggccguuaggccgaanguacgau

SEQ ID NO: 14905 - RNA, 38 nt, Artificial Sequence
  Description of Artificial Sequence:  Enzymatic Nucleic Acid
  misc_feature (31)..(31): n stands for inosine
aucaauuacugaugaggccguuaggccgaanuugguac

SEQ ID NO: 14906 - RNA, 38 nt, Artificial Sequence
  Description of Artificial Sequence:  Enzymatic Nucleic Acid
  misc_feature (31)..(31): n stands for inosine
aguugccacugaugaggccguuaggccgaanuuuauca

SEQ ID NO: 14907 - RNA, 38 nt, Artificial Sequence
  Description of Artificial Sequence:  Enzymatic Nucleic Acid
  misc_feature (31)..(31): n stands for inosine
aaagcagucugaugaggccguuaggccgaanccaaguu

SEQ ID NO: 14908 - RNA, 38 nt, Artificial Sequence
  Description of Artificial Sequence:  Enzymatic Nucleic Acid
  misc_feature (31)..(31): n stands for inosine
auaaaagccugaugaggccguuaggccgaanuugccaa

SEQ ID NO: 14909 - RNA, 38 nt, Artificial Sequence
  Description of Artificial Sequence:  Enzymatic Nucleic Acid
  misc_feature (31)..(31): n stands for inosine
aacauaaacugaugaggccguuaggccgaancaguugc

SEQ ID NO: 14910 - RNA, 38 nt, Artificial Sequence
  Description of Artificial Sequence:  Enzymatic Nucleic Acid
  misc_feature (31)..(31): n stands for inosine
aaggagaccugaugaggccguuaggccgaanaacauaa

SEQ ID NO: 14911 - RNA, 38 nt, Artificial Sequence
  Description of Artificial Sequence:  Enzymatic Nucleic Acid
  misc_feature (31)..(31): n stands for inosine
auggaaggcugaugaggccguuaggccgaanacagaac

SEQ ID NO: 14912 - RNA, 38 nt, Artificial Sequence
  Description of Artificial Sequence:  Enzymatic Nucleic Acid
  misc_feature (31)..(31): n stands for inosine
uuauggaacugaugaggccguuaggccgaanagacaga

SEQ ID NO: 14913 - RNA, 38 nt, Artificial Sequence
  Description of Artificial Sequence:  Enzymatic Nucleic Acid
  misc_feature (31)..(31): n stands for inosine
uuuauggacugaugaggccguuaggccgaangagacag

SEQ ID NO: 14914 - RNA, 38 nt, Artificial Sequence
  Description of Artificial Sequence:  Enzymatic Nucleic Acid
  misc_feature (31)..(31): n stands for inosine
aaauuuaucugaugaggccguuaggccgaanaaggaga

SEQ ID NO: 14915 - RNA, 38 nt, Artificial Sequence
  Description of Artificial Sequence:  Enzymatic Nucleic Acid
  misc_feature (31)..(31): n stands for inosine
aaaauuuacugaugaggccguuaggccgaangaaggag

SEQ ID NO: 14916 - RNA, 38 nt, Artificial Sequence
  Description of Artificial Sequence:  Enzymatic Nucleic Acid
  misc_feature (31)..(31): n stands for inosine
uaguauuucugaugaggccguuaggccgaanaaaaauu

SEQ ID NO: 14917 - RNA, 38 nt, Artificial Sequence
  Description of Artificial Sequence:  Enzymatic Nucleic Acid
  misc_feature (31)..(31): n stands for inosine
guugaauucugaugaggccguuaggccgaanuauuuug

SEQ ID NO: 14918 - RNA, 38 nt, Artificial Sequence
  Description of Artificial Sequence:  Enzymatic Nucleic Acid
  misc_feature (31)..(31): n stands for inosine
uucuuugucugaugaggccguuaggccgaanaauuagu

SEQ ID NO: 14919 - RNA, 38 nt, Artificial Sequence
  Description of Artificial Sequence:  Enzymatic Nucleic Acid
  misc_feature (31)..(31): n stands for inosine
uuuuucuucugaugaggccguuaggccgaanuugaauu

SEQ ID NO: 14920 - RNA, 38 nt, Artificial Sequence
  Description of Artificial Sequence:  Enzymatic Nucleic Acid
  misc_feature (31)..(31): n stands for inosine
aaaaaaagcugaugaggccguuaggccgaancuuuuuc

SEQ ID NO: 14921 - RNA, 38 nt, Artificial Sequence
  Description of Artificial Sequence:  Enzymatic Nucleic Acid
  misc_feature (31)..(31): n stands for inosine
gaaaaaaacugaugaggccguuaggccgaanagcuuuu

SEQ ID NO: 14922 - RNA, 38 nt, Artificial Sequence
  Description of Artificial Sequence:  Enzymatic Nucleic Acid
  misc_feature (31)..(31): n stands for inosine
uuauuuuacugaugaggccguuaggccgaanaaaaaaa

SEQ ID NO: 14923 - RNA, 38 nt, Artificial Sequence
  Description of Artificial Sequence:  Enzymatic Nucleic Acid
  misc_feature (31)..(31): n stands for inosine
uuuauuuucugaugaggccguuaggccgaangaaaaaa

SEQ ID NO: 14924 - RNA, 38 nt, Artificial Sequence
  Description of Artificial Sequence:  Enzymatic Nucleic Acid
  misc_feature (31)..(31): n stands for inosine
uaaauuugcugaugaggccguuaggccgaanuuuauuu

SEQ ID NO: 14925 - RNA, 38 nt, Artificial Sequence
  Description of Artificial Sequence:  Enzymatic Nucleic Acid
  misc_feature (31)..(31): n stands for inosine
gauaaauucugaugaggccguuaggccgaanaguuuau

SEQ ID NO: 14926 - RNA, 38 nt, Artificial Sequence
  Description of Artificial Sequence:  Enzymatic Nucleic Acid
  misc_feature (31)..(31): n stands for inosine
cuaaacaacugaugaggccguuaggccgaanauaaauu

SEQ ID NO: 14927 - RNA, 38 nt, Artificial Sequence
  Description of Artificial Sequence:  Enzymatic Nucleic Acid
  misc_feature (31)..(31): n stands for inosine
ucuaaacacugaugaggccguuaggccgaangauaaau

SEQ ID NO: 14928 - RNA, 38 nt, Artificial Sequence
  Description of Artificial Sequence:  Enzymatic Nucleic Acid
  misc_feature (31)..(31): n stands for inosine
uuuuucuccugaugaggccguuaggccgaancucuaaa

SEQ ID NO: 14929 - RNA, 38 nt, Artificial Sequence
  Description of Artificial Sequence:  Enzymatic Nucleic Acid
  misc_feature (31)..(31): n stands for inosine
cauuucaacugaugaggccguuaggccgaanuuuuucu

SEQ ID NO: 14930 - RNA, 38 nt, Artificial Sequence
  Description of Artificial Sequence:  Enzymatic Nucleic Acid
  misc_feature (31)..(31): n stands for inosine
auuuuuugcugaugaggccguuaggccgaanaccauuu

SEQ ID NO: 14931 - RNA, 38 nt, Artificial Sequence
  Description of Artificial Sequence:  Enzymatic Nucleic Acid
  misc_feature (31)..(31): n stands for inosine
caauuuuucugaugaggccguuaggccgaanagaccau

SEQ ID NO: 14932 - RNA, 38 nt, Artificial Sequence
  Description of Artificial Sequence:  Enzymatic Nucleic Acid
  misc_feature (31)..(31): n stands for inosine
aaauauuucugaugaggccguuaggccgaancaauuuu

SEQ ID NO: 14933 - RNA, 38 nt, Artificial Sequence
  Description of Artificial Sequence:  Enzymatic Nucleic Acid
  misc_feature (31)..(31): n stands for inosine
uuuuccaucugaugaggccguuaggccgaanaaaauau

SEQ ID NO: 14934 - RNA, 38 nt, Artificial Sequence
  Description of Artificial Sequence:  Enzymatic Nucleic Acid
  misc_feature (31)..(31): n stands for inosine
uaacauuucugaugaggccguuaggccgaanuuuucca

SEQ ID NO: 14935 - RNA, 38 nt, Artificial Sequence
  Description of Artificial Sequence:  Enzymatic Nucleic Acid
  misc_feature (31)..(31): n stands for inosine
auacaauccugaugaggccguuaggccgaancuaaacu

SEQ ID NO: 14936 - RNA, 38 nt, Artificial Sequence
  Description of Artificial Sequence:  Enzymatic Nucleic Acid
  misc_feature (31)..(31): n stands for inosine
aagugaaacugaugaggccguuaggccgaanuucgaaa

SEQ ID NO: 14937 - RNA, 38 nt, Artificial Sequence
  Description of Artificial Sequence:  Enzymatic Nucleic Acid
  misc_feature (31)..(31): n stands for inosine
aaagugaacugaugaggccguuaggccgaanguucgaa

SEQ ID NO: 14938 - RNA, 38 nt, Artificial Sequence
  Description of Artificial Sequence:  Enzymatic Nucleic Acid
  misc_feature (31)..(31): n stands for inosine
acaaaaagcugaugaggccguuaggccgaanaaagguu

SEQ ID NO: 14939 - RNA, 38 nt, Artificial Sequence
  Description of Artificial Sequence:  Enzymatic Nucleic Acid
  misc_feature (31)..(31): n stands for inosine
aaacaaaacugaugaggccguuaggccgaanugaaagg

SEQ ID NO: 14940 - RNA, 38 nt, Artificial Sequence
  Description of Artificial Sequence:  Enzymatic Nucleic Acid
  misc_feature (31)..(31): n stands for inosine
gugaaauacugaugaggccguuaggccgaanuaaaaca

SEQ ID NO: 14941 - RNA, 38 nt, Artificial Sequence
  Description of Artificial Sequence:  Enzymatic Nucleic Acid
  misc_feature (31)..(31): n stands for inosine
ugugaaaucugaugaggccguuaggccgaanguaaaac

SEQ ID NO: 14942 - RNA, 38 nt, Artificial Sequence
  Description of Artificial Sequence:  Enzymatic Nucleic Acid
  misc_feature (31)..(31): n stands for inosine
cacaguugcugaugaggccguuaggccgaanaaauagg

SEQ ID NO: 14943 - RNA, 38 nt, Artificial Sequence
  Description of Artificial Sequence:  Enzymatic Nucleic Acid
  misc_feature (31)..(31): n stands for inosine
uacacagucugaugaggccguuaggccgaanugaaaua

SEQ ID NO: 14944 - RNA, 38 nt, Artificial Sequence
  Description of Artificial Sequence:  Enzymatic Nucleic Acid
  misc_feature (31)..(31): n stands for inosine
auuuacaccugaugaggccguuaggccgaanuugugaa

SEQ ID NO: 14945 - RNA, 38 nt, Artificial Sequence
  Description of Artificial Sequence:  Enzymatic Nucleic Acid
  misc_feature (31)..(31): n stands for inosine
gaauuauucugaugaggccguuaggccgaancaauuua

SEQ ID NO: 14946 - RNA, 38 nt, Artificial Sequence
  Description of Artificial Sequence:  Enzymatic Nucleic Acid
  misc_feature (31)..(31): n stands for inosine
ggaauuaucugaugaggccguuaggccgaangcaauuu

SEQ ID NO: 14947 - RNA, 38 nt, Artificial Sequence
  Description of Artificial Sequence:  Enzymatic Nucleic Acid
  misc_feature (31)..(31): n stands for inosine
cauggacacugaugaggccguuaggccgaanaauuauu

SEQ ID NO: 14948 - RNA, 38 nt, Artificial Sequence
  Description of Artificial Sequence:  Enzymatic Nucleic Acid
  misc_feature (31)..(31): n stands for inosine
ucauggaccugaugaggccguuaggccgaangaauuau

SEQ ID NO: 14949 - RNA, 38 nt, Artificial Sequence
  Description of Artificial Sequence:  Enzymatic Nucleic Acid
  misc_feature (31)..(31): n stands for inosine
auuuucaucugaugaggccguuaggccgaanacaggaa

SEQ ID NO: 14950 - RNA, 38 nt, Artificial Sequence
  Description of Artificial Sequence:  Enzymatic Nucleic Acid
  misc_feature (31)..(31): n stands for inosine
cauuuucacugaugaggccguuaggccgaangacagga

SEQ ID NO: 14951 - RNA, 38 nt, Artificial Sequence
  Description of Artificial Sequence:  Enzymatic Nucleic Acid
  misc_feature (31)..(31): n stands for inosine
ggauaauucugaugaggccguuaggccgaancauuuuc

SEQ ID NO: 14952 - RNA, 38 nt, Artificial Sequence
  Description of Artificial Sequence:  Enzymatic Nucleic Acid
  misc_feature (31)..(31): n stands for inosine
ucuacacucugaugaggccguuaggccgaanauaauuu

SEQ ID NO: 14953 - RNA, 38 nt, Artificial Sequence
  Description of Artificial Sequence:  Enzymatic Nucleic Acid
  misc_feature (31)..(31): n stands for inosine
aucuacaccugaugaggccguuaggccgaangauaauu

SEQ ID NO: 14954 - RNA, 38 nt, Artificial Sequence
  Description of Artificial Sequence:  Enzymatic Nucleic Acid
  misc_feature (31)..(31): n stands for inosine
agggugaucugaugaggccguuaggccgaanucaaaua

SEQ ID NO: 14955 - RNA, 38 nt, Artificial Sequence
  Description of Artificial Sequence:  Enzymatic Nucleic Acid
  misc_feature (31)..(31): n stands for inosine
uagggugacugaugaggccguuaggccgaangucaaau

SEQ ID NO: 14956 - RNA, 38 nt, Artificial Sequence
  Description of Artificial Sequence:  Enzymatic Nucleic Acid
  misc_feature (31)..(31): n stands for inosine
ccauagggcugaugaggccguuaggccgaanaugguca

SEQ ID NO: 14957 - RNA, 38 nt, Artificial Sequence
  Description of Artificial Sequence:  Enzymatic Nucleic Acid
  misc_feature (31)..(31): n stands for inosine
auccauagcugaugaggccguuaggccgaanugauggu

SEQ ID NO: 14958 - RNA, 38 nt, Artificial Sequence
  Description of Artificial Sequence:  Enzymatic Nucleic Acid
  misc_feature (31)..(31): n stands for inosine
uauccauacugaugaggccguuaggccgaangugaugg

SEQ ID NO: 14959 - RNA, 38 nt, Artificial Sequence
  Description of Artificial Sequence:  Enzymatic Nucleic Acid
  misc_feature (31)..(31): n stands for inosine
auauccaucugaugaggccguuaggccgaanggugaug

SEQ ID NO: 14960 - RNA, 38 nt, Artificial Sequence
  Description of Artificial Sequence:  Enzymatic Nucleic Acid
  misc_feature (31)..(31): n stands for inosine
gcaaaacucugaugaggccguuaggccgaanccaauau

SEQ ID NO: 14961 - RNA, 38 nt, Artificial Sequence
  Description of Artificial Sequence:  Enzymatic Nucleic Acid
  misc_feature (31)..(31): n stands for inosine
uuaauaaacugaugaggccguuaggccgaancaaaacu

SEQ ID NO: 14962 - RNA, 38 nt, Artificial Sequence
  Description of Artificial Sequence:  Enzymatic Nucleic Acid
  misc_feature (31)..(31): n stands for inosine
cuuaauaacugaugaggccguuaggccgaangcaaaac

SEQ ID NO: 14963 - RNA, 38 nt, Artificial Sequence
  Description of Artificial Sequence:  Enzymatic Nucleic Acid
  misc_feature (31)..(31): n stands for inosine
aaugaauucugaugaggccguuaggccgaancuuaaua

SEQ ID NO: 14964 - RNA, 38 nt, Artificial Sequence
  Description of Artificial Sequence:  Enzymatic Nucleic Acid
  misc_feature (31)..(31): n stands for inosine
ggcugaaacugaugaggccguuaggccgaanaauuugc

SEQ ID NO: 14965 - RNA, 38 nt, Artificial Sequence
  Description of Artificial Sequence:  Enzymatic Nucleic Acid
  misc_feature (31)..(31): n stands for inosine
auucaggccugaugaggccguuaggccgaanaaaugaa

SEQ ID NO: 14966 - RNA, 38 nt, Artificial Sequence
  Description of Artificial Sequence:  Enzymatic Nucleic Acid
  misc_feature (31)..(31): n stands for inosine
gacauucacugaugaggccguuaggccgaancugaaau

SEQ ID NO: 14967 - RNA, 38 nt, Artificial Sequence
  Description of Artificial Sequence:  Enzymatic Nucleic Acid
  misc_feature (31)..(31): n stands for inosine
agacauuccugaugaggccguuaggccgaangcugaaa

SEQ ID NO: 14968 - RNA, 38 nt, Artificial Sequence
  Description of Artificial Sequence:  Enzymatic Nucleic Acid
  misc_feature (31)..(31): n stands for inosine
auauaggccugaugaggccguuaggccgaanacauuca

SEQ ID NO: 14969 - RNA, 38 nt, Artificial Sequence
  Description of Artificial Sequence:  Enzymatic Nucleic Acid
  misc_feature (31)..(31): n stands for inosine
aauauauacugaugaggccguuaggccgaancagacau

SEQ ID NO: 14970 - RNA, 38 nt, Artificial Sequence
  Description of Artificial Sequence:  Enzymatic Nucleic Acid
  misc_feature (31)..(31): n stands for inosine
gaauauaucugaugaggccguuaggccgaangcagaca

SEQ ID NO: 14971 - RNA, 38 nt, Artificial Sequence
  Description of Artificial Sequence:  Enzymatic Nucleic Acid
  misc_feature (31)..(31): n stands for inosine
aagagcagcugaugaggccguuaggccgaanaauauau

SEQ ID NO: 14972 - RNA, 38 nt, Artificial Sequence
  Description of Artificial Sequence:  Enzymatic Nucleic Acid
  misc_feature (31)..(31): n stands for inosine
caaagagccugaugaggccguuaggccgaanagaauau

SEQ ID NO: 14973 - RNA, 38 nt, Artificial Sequence
  Description of Artificial Sequence:  Enzymatic Nucleic Acid
  misc_feature (31)..(31): n stands for inosine
auacaaagcugaugaggccguuaggccgaancagagaa

SEQ ID NO: 14974 - RNA, 38 nt, Artificial Sequence
  Description of Artificial Sequence:  Enzymatic Nucleic Acid
  misc_feature (31)..(31): n stands for inosine
gaauacaacugaugaggccguuaggccgaanagcagag

SEQ ID NO: 14975 - RNA, 38 nt, Artificial Sequence
  Description of Artificial Sequence:  Enzymatic Nucleic Acid
  misc_feature (31)..(31): n stands for inosine
uucaaaggcugaugaggccguuaggccgaanaauacaa

SEQ ID NO: 14976 - RNA, 38 nt, Artificial Sequence
  Description of Artificial Sequence:  Enzymatic Nucleic Acid
  misc_feature (31)..(31): n stands for inosine
gguucaaacugaugaggccguuaggccgaanagaauac

SEQ ID NO: 14977 - RNA, 38 nt, Artificial Sequence
  Description of Artificial Sequence:  Enzymatic Nucleic Acid
  misc_feature (31)..(31): n stands for inosine
ggguucaacugaugaggccguuaggccgaangagaaua

SEQ ID NO: 14978 - RNA, 38 nt, Artificial Sequence
  Description of Artificial Sequence:  Enzymatic Nucleic Acid
  misc_feature (31)..(31): n stands for inosine
uuuuaacgcugaugaggccguuaggccgaanuucaaag

SEQ ID NO: 14979 - RNA, 38 nt, Artificial Sequence
  Description of Artificial Sequence:  Enzymatic Nucleic Acid
  misc_feature (31)..(31): n stands for inosine
guuuuaaccugaugaggccguuaggccgaanguucaaa

SEQ ID NO: 14980 - RNA, 38 nt, Artificial Sequence
  Description of Artificial Sequence:  Enzymatic Nucleic Acid
  misc_feature (31)..(31): n stands for inosine
ccacaggacugaugaggccguuaggccgaanuuuuaac

SEQ ID NO: 14981 - RNA, 38 nt, Artificial Sequence
  Description of Artificial Sequence:  Enzymatic Nucleic Acid
  misc_feature (31)..(31): n stands for inosine
gugccacacugaugaggccguuaggccgaanauguuuu

SEQ ID NO: 14982 - RNA, 38 nt, Artificial Sequence
  Description of Artificial Sequence:  Enzymatic Nucleic Acid
  misc_feature (31)..(31): n stands for inosine
agugccaccugaugaggccguuaggccgaangauguuu

SEQ ID NO: 14983 - RNA, 36 nt, Artificial Sequence
  Description of Artificial Sequence:  Enzymatic Nucleic Acid
cgcugugauggcaugcacuaugcgcgacccgagccc

SEQ ID NO: 14984 - RNA, 36 nt, Artificial Sequence
  Description of Artificial Sequence:  Enzymatic Nucleic Acid
auccuugauggcaugcacuaugcgcggccgccaggc

SEQ ID NO: 14985 - RNA, 36 nt, Artificial Sequence
  Description of Artificial Sequence:  Enzymatic Nucleic Acid
ggagaugauggcaugcacuaugcgcgaaccacuucc

SEQ ID NO: 14986 - RNA, 36 nt, Artificial Sequence
  Description of Artificial Sequence:  Enzymatic Nucleic Acid
ucucgugauggcaugcacuaugcgcgggcuccagcc

SEQ ID NO: 14987 - RNA, 36 nt, Artificial Sequence
  Description of Artificial Sequence:  Enzymatic Nucleic Acid
cgucuugauggcaugcacuaugcgcggcggcuccag

SEQ ID NO: 14988 - RNA, 36 nt, Artificial Sequence
  Description of Artificial Sequence:  Enzymatic Nucleic Acid
cugagugauggcaugcacuaugcgcggcccgucucg

SEQ ID NO: 14989 - RNA, 36 nt, Artificial Sequence
  Description of Artificial Sequence:  Enzymatic Nucleic Acid
ccccgugauggcaugcacuaugcgcggcccugagcg

SEQ ID NO: 14990 - RNA, 36 nt, Artificial Sequence
  Description of Artificial Sequence:  Enzymatic Nucleic Acid
ucguuugauggcaugcacuaugcgcggccgccgccg

SEQ ID NO: 14991 - RNA, 36 nt, Artificial Sequence
  Description of Artificial Sequence:  Enzymatic Nucleic Acid
ccucuugauggcaugcacuaugcgcgguucgccgcc

SEQ ID NO: 14992 - RNA, 36 nt, Artificial Sequence
  Description of Artificial Sequence:  Enzymatic Nucleic Acid
gcccgugauggcaugcacuaugcgcggcucccccgg

SEQ ID NO: 14993 - RNA, 36 nt, Artificial Sequence
  Description of Artificial Sequence:  Enzymatic Nucleic Acid
cugcuugauggcaugcacuaugcgcggcccggugcc

SEQ ID NO: 14994 - RNA, 36 nt, Artificial Sequence
  Description of Artificial Sequence:  Enzymatic Nucleic Acid
cgacgugauggcaugcacuaugcgcgggccugcucg

SEQ ID NO: 14995 - RNA, 36 nt, Artificial Sequence
  Description of Artificial Sequence:  Enzymatic Nucleic Acid
gagcgugauggcaugcacuaugcgcggacgcggccu

SEQ ID NO: 14996 - RNA, 36 nt, Artificial Sequence
  Description of Artificial Sequence:  Enzymatic Nucleic Acid
gugagugauggcaugcacuaugcgcggcgacgcggc

SEQ ID NO: 14997 - RNA, 36 nt, Artificial Sequence
  Description of Artificial Sequence:  Enzymatic Nucleic Acid
cacagugauggcaugcacuaugcgcgaggaccccgg

SEQ ID NO: 14998 - RNA, 36 nt, Artificial Sequence
  Description of Artificial Sequence:  Enzymatic Nucleic Acid
gcgcaugauggcaugcacuaugcgcgagcaggaccc

SEQ ID NO: 14999 - RNA, 36 nt, Artificial Sequence
  Description of Artificial Sequence:  Enzymatic Nucleic Acid
gcgcgugauggcaugcacuaugcgcgacagcaggac

SEQ ID NO: 15000 - RNA, 36 nt, Artificial Sequence
  Description of Artificial Sequence:  Enzymatic Nucleic Acid
cagcgugauggcaugcacuaugcgcggcacagcagg

SEQ ID NO: 15001 - RNA, 36 nt, Artificial Sequence
  Description of Artificial Sequence:  Enzymatic Nucleic Acid
agcagugauggcaugcacuaugcgcggcgcacagca

SEQ ID NO: 15002 - RNA, 36 nt, Artificial Sequence
  Description of Artificial Sequence:  Enzymatic Nucleic Acid
cugagugauggcaugcacuaugcgcgagcgcgcaca

SEQ ID NO: 15003 - RNA, 36 nt, Artificial Sequence
  Description of Artificial Sequence:  Enzymatic Nucleic Acid
gcagaugauggcaugcacuaugcgcgagcugagcag

SEQ ID NO: 15004 - RNA, 36 nt, Artificial Sequence
  Description of Artificial Sequence:  Enzymatic Nucleic Acid
agaagugauggcaugcacuaugcgcgagacagcuga

SEQ ID NO: 15005 - RNA, 36 nt, Artificial Sequence
  Description of Artificial Sequence:  Enzymatic Nucleic Acid
caguuugauggcaugcacuaugcgcgaggaucuuuu

SEQ ID NO: 15006 - RNA, 36 nt, Artificial Sequence
  Description of Artificial Sequence:  Enzymatic Nucleic Acid
aaacuugauggcaugcacuaugcgcgaguucaggau

SEQ ID NO: 15007 - RNA, 36 nt, Artificial Sequence
  Description of Artificial Sequence:  Enzymatic Nucleic Acid
gcuugugauggcaugcacuaugcgcgaugaugugcu

SEQ ID NO: 15008 - RNA, 36 nt, Artificial Sequence
  Description of Artificial Sequence:  Enzymatic Nucleic Acid
agaugugauggcaugcacuaugcgcgagugucuggc

SEQ ID NO: 15009 - RNA, 36 nt, Artificial Sequence
  Description of Artificial Sequence:  Enzymatic Nucleic Acid
cccugugauggcaugcacuaugcgcgauuggagaug

SEQ ID NO: 15010 - RNA, 36 nt, Artificial Sequence
  Description of Artificial Sequence:  Enzymatic Nucleic Acid
ucaggugauggcaugcacuaugcgcgaaagaccauu

SEQ ID NO: 15011 - RNA, 36 nt, Artificial Sequence
  Description of Artificial Sequence:  Enzymatic Nucleic Acid
cauuuugauggcaugcacuaugcgcgaggcaaagac

SEQ ID NO: 15012 - RNA, 36 nt, Artificial Sequence
  Description of Artificial Sequence:  Enzymatic Nucleic Acid
uuacuugauggcaugcacuaugcgcgaccauuucag

SEQ ID NO: 15013 - RNA, 36 nt, Artificial Sequence
  Description of Artificial Sequence:  Enzymatic Nucleic Acid
ccuuuugauggcaugcacuaugcgcggcuuuccuua

SEQ ID NO: 15014 - RNA, 36 nt, Artificial Sequence
  Description of Artificial Sequence:  Enzymatic Nucleic Acid
augcuugauggcaugcacuaugcgcgagccuuucgc

SEQ ID NO: 15015 - RNA, 36 nt, Artificial Sequence
  Description of Artificial Sequence:  Enzymatic Nucleic Acid
acaggugauggcaugcacuaugcgcgagauuuaguu

SEQ ID NO: 15016 - RNA, 36 nt, Artificial Sequence
  Description of Artificial Sequence:  Enzymatic Nucleic Acid
uuccaugauggcaugcacuaugcgcgaggcagauuu

SEQ ID NO: 15017 - RNA, 36 nt, Artificial Sequence
  Description of Artificial Sequence:  Enzymatic Nucleic Acid
uacugugauggcaugcacuaugcgcgagaauuguuu

SEQ ID NO: 15018 - RNA, 36 nt, Artificial Sequence
  Description of Artificial Sequence:  Enzymatic Nucleic Acid
guguuugauggcaugcacuaugcgcgaagguuaaag

SEQ ID NO: 15019 - RNA, 36 nt, Artificial Sequence
  Description of Artificial Sequence:  Enzymatic Nucleic Acid
auuugugauggcaugcacuaugcgcgagcuguagaa

SEQ ID NO: 15020 - RNA, 36 nt, Artificial Sequence
  Description of Artificial Sequence:  Enzymatic Nucleic Acid
agguaugauggcaugcacuaugcgcgagcuagauau

SEQ ID NO: 15021 - RNA, 36 nt, Artificial Sequence
  Description of Artificial Sequence:  Enzymatic Nucleic Acid
gauugugauggcaugcacuaugcgcgagauucuguu

SEQ ID NO: 15022 - RNA, 36 nt, Artificial Sequence
  Description of Artificial Sequence:  Enzymatic Nucleic Acid
uguauugauggcaugcacuaugcgcgacuaauaaau

SEQ ID NO: 15023 - RNA, 36 nt, Artificial Sequence
  Description of Artificial Sequence:  Enzymatic Nucleic Acid
cuguaugauggcaugcacuaugcgcgaucucuacga

SEQ ID NO: 15024 - RNA, 36 nt, Artificial Sequence
  Description of Artificial Sequence:  Enzymatic Nucleic Acid
gauuuugauggcaugcacuaugcgcgacuguacauc

SEQ ID NO: 15025 - RNA, 36 nt, Artificial Sequence
  Description of Artificial Sequence:  Enzymatic Nucleic Acid
aauuuugauggcaugcacuaugcgcgggggauuuca

SEQ ID NO: 15026 - RNA, 36 nt, Artificial Sequence
  Description of Artificial Sequence:  Enzymatic Nucleic Acid
ucaguugauggcaugcacuaugcgcgauguguauaa

SEQ ID NO: 15027 - RNA, 36 nt, Artificial Sequence
  Description of Artificial Sequence:  Enzymatic Nucleic Acid
uccuuugauggcaugcacuaugcgcgagucaugugu

SEQ ID NO: 15028 - RNA, 36 nt, Artificial Sequence
  Description of Artificial Sequence:  Enzymatic Nucleic Acid
cccggugauggcaugcacuaugcgcgagggaaugac

SEQ ID NO: 15029 - RNA, 36 nt, Artificial Sequence
  Description of Artificial Sequence:  Enzymatic Nucleic Acid
aguaaugauggcaugcacuaugcgcgagugauguua

SEQ ID NO: 15030 - RNA, 36 nt, Artificial Sequence
  Description of Artificial Sequence:  Enzymatic Nucleic Acid
aguguugauggcaugcacuaugcgcgaaguggaaac

SEQ ID NO: 15031 - RNA, 36 nt, Artificial Sequence
  Description of Artificial Sequence:  Enzymatic Nucleic Acid
gggauugauggcaugcacuaugcgcgaaagugucaa

SEQ ID NO: 15032 - RNA, 36 nt, Artificial Sequence
  Description of Artificial Sequence:  Enzymatic Nucleic Acid
uccauugauggcaugcacuaugcgcgagggaucaaa

SEQ ID NO: 15033 - RNA, 36 nt, Artificial Sequence
  Description of Artificial Sequence:  Enzymatic Nucleic Acid
uuaugugauggcaugcacuaugcgcgguuuuccauc

SEQ ID NO: 15034 - RNA, 36 nt, Artificial Sequence
  Description of Artificial Sequence:  Enzymatic Nucleic Acid
cguugugauggcaugcacuaugcgcgauuugauaug

SEQ ID NO: 15035 - RNA, 36 nt, Artificial Sequence
  Description of Artificial Sequence:  Enzymatic Nucleic Acid
cagguugauggcaugcacuaugcgcgagaagcccua

SEQ ID NO: 15036 - RNA, 36 nt, Artificial Sequence
  Description of Artificial Sequence:  Enzymatic Nucleic Acid
cuucaugauggcaugcacuaugcgcgaggucagaag

SEQ ID NO: 15037 - RNA, 36 nt, Artificial Sequence
  Description of Artificial Sequence:  Enzymatic Nucleic Acid
ugcuuugauggcaugcacuaugcgcgacaggucaga

SEQ ID NO: 15038 - RNA, 36 nt, Artificial Sequence
  Description of Artificial Sequence:  Enzymatic Nucleic Acid
uuauaugauggcaugcacuaugcgcgaaaugcccau

SEQ ID NO: 15039 - RNA, 36 nt, Artificial Sequence
  Description of Artificial Sequence:  Enzymatic Nucleic Acid
uuuguugauggcaugcacuaugcgcggaugugugag

SEQ ID NO: 15040 - RNA, 36 nt, Artificial Sequence
  Description of Artificial Sequence:  Enzymatic Nucleic Acid
uuggaugauggcaugcacuaugcgcgaucuaugauu

SEQ ID NO: 15041 - RNA, 36 nt, Artificial Sequence
  Description of Artificial Sequence:  Enzymatic Nucleic Acid
cugggugauggcaugcacuaugcgcgguggugugcu

SEQ ID NO: 15042 - RNA, 36 nt, Artificial Sequence
  Description of Artificial Sequence:  Enzymatic Nucleic Acid
gaggaugauggcaugcacuaugcgcgaagaguaugg

SEQ ID NO: 15043 - RNA, 36 nt, Artificial Sequence
  Description of Artificial Sequence:  Enzymatic Nucleic Acid
caguaugauggcaugcacuaugcgcgaauugaggac

SEQ ID NO: 15044 - RNA, 36 nt, Artificial Sequence
  Description of Artificial Sequence:  Enzymatic Nucleic Acid
gguagugauggcaugcacuaugcgcgaguacaauug

SEQ ID NO: 15045 - RNA, 36 nt, Artificial Sequence
  Description of Artificial Sequence:  Enzymatic Nucleic Acid
guguuugauggcaugcacuaugcgcgaagggagugg

SEQ ID NO: 15046 - RNA, 36 nt, Artificial Sequence
  Description of Artificial Sequence:  Enzymatic Nucleic Acid
acucuugauggcaugcacuaugcgcgguguucaagg

SEQ ID NO: 15047 - RNA, 36 nt, Artificial Sequence
  Description of Artificial Sequence:  Enzymatic Nucleic Acid
cagguugauggcaugcacuaugcgcgauuugaacuc

SEQ ID NO: 15048 - RNA, 36 nt, Artificial Sequence
  Description of Artificial Sequence:  Enzymatic Nucleic Acid
uucauugauggcaugcacuaugcgcgaggguaacuc

SEQ ID NO: 15049 - RNA, 36 nt, Artificial Sequence
  Description of Artificial Sequence:  Enzymatic Nucleic Acid
uuuuuugauggcaugcacuaugcgcgaucaggguaa

SEQ ID NO: 15050 - RNA, 36 nt, Artificial Sequence
  Description of Artificial Sequence:  Enzymatic Nucleic Acid
uucguugauggcaugcacuaugcgcggccuuacgga

SEQ ID NO: 15051 - RNA, 36 nt, Artificial Sequence
  Description of Artificial Sequence:  Enzymatic Nucleic Acid
caauuugauggcaugcacuaugcgcggucgccuuac

SEQ ID NO: 15052 - RNA, 36 nt, Artificial Sequence
  Description of Artificial Sequence:  Enzymatic Nucleic Acid
uugguugauggcaugcacuaugcgcgaauucgucgc

SEQ ID NO: 15053 - RNA, 36 nt, Artificial Sequence
  Description of Artificial Sequence:  Enzymatic Nucleic Acid
guuggugauggcaugcacuaugcgcgaugggaauug

SEQ ID NO: 15054 - RNA, 36 nt, Artificial Sequence
  Description of Artificial Sequence:  Enzymatic Nucleic Acid
aagaaugauggcaugcacuaugcgcgacuguagaau

SEQ ID NO: 15055 - RNA, 36 nt, Artificial Sequence
  Description of Artificial Sequence:  Enzymatic Nucleic Acid
uuuguugauggcaugcacuaugcgcgaauaguaaga

SEQ ID NO: 15056 - RNA, 36 nt, Artificial Sequence
  Description of Artificial Sequence:  Enzymatic Nucleic Acid
uucugugauggcaugcacuaugcgcgauuuugucaa

SEQ ID NO: 15057 - RNA, 36 nt, Artificial Sequence
  Description of Artificial Sequence:  Enzymatic Nucleic Acid
cacgaugauggcaugcacuaugcgcgaaguauaaag

SEQ ID NO: 15058 - RNA, 36 nt, Artificial Sequence
  Description of Artificial Sequence:  Enzymatic Nucleic Acid
ccuuaugauggcaugcacuaugcgcgacgacaagua

SEQ ID NO: 15059 - RNA, 36 nt, Artificial Sequence
  Description of Artificial Sequence:  Enzymatic Nucleic Acid
guuaaugauggcaugcacuaugcgcgagauuugaau

SEQ ID NO: 15060 - RNA, 36 nt, Artificial Sequence
  Description of Artificial Sequence:  Enzymatic Nucleic Acid
auaugugauggcaugcacuaugcgcgacugaggugu

SEQ ID NO: 15061 - RNA, 36 nt, Artificial Sequence
  Description of Artificial Sequence:  Enzymatic Nucleic Acid
uuuauugauggcaugcacuaugcgcgauauauaugc

SEQ ID NO: 15062 - RNA, 36 nt, Artificial Sequence
  Description of Artificial Sequence:  Enzymatic Nucleic Acid
uuucaugauggcaugcacuaugcgcgagugaugaau

SEQ ID NO: 15063 - RNA, 36 nt, Artificial Sequence
  Description of Artificial Sequence:  Enzymatic Nucleic Acid
uguuuugauggcaugcacuaugcgcgacagugauga

SEQ ID NO: 15064 - RNA, 36 nt, Artificial Sequence
  Description of Artificial Sequence:  Enzymatic Nucleic Acid
guuuuugauggcaugcacuaugcgcggauguuucac

SEQ ID NO: 15065 - RNA, 36 nt, Artificial Sequence
  Description of Artificial Sequence:  Enzymatic Nucleic Acid
ucaagugauggcaugcacuaugcgcgaccugcuguu

SEQ ID NO: 15066 - RNA, 36 nt, Artificial Sequence
  Description of Artificial Sequence:  Enzymatic Nucleic Acid
gguuuugauggcaugcacuaugcgcgaagcaccugc

SEQ ID NO: 15067 - RNA, 36 nt, Artificial Sequence
  Description of Artificial Sequence:  Enzymatic Nucleic Acid
acuuuugauggcaugcacuaugcgcgauagagagcc

SEQ ID NO: 15068 - RNA, 36 nt, Artificial Sequence
  Description of Artificial Sequence:  Enzymatic Nucleic Acid
gccuuugauggcaugcacuaugcgcgacuuucauag

SEQ ID NO: 15069 - RNA, 36 nt, Artificial Sequence
  Description of Artificial Sequence:  Enzymatic Nucleic Acid
uccggugauggcaugcacuaugcgcggagggaaaug

SEQ ID NO: 15070 - RNA, 36 nt, Artificial Sequence
  Description of Artificial Sequence:  Enzymatic Nucleic Acid
ccauaugauggcaugcacuaugcgcgaacuuccggc

SEQ ID NO: 15071 - RNA, 36 nt, Artificial Sequence
  Description of Artificial Sequence:  Enzymatic Nucleic Acid
agucgugauggcaugcacuaugcgcgagguaaccca

SEQ ID NO: 15072 - RNA, 36 nt, Artificial Sequence
  Description of Artificial Sequence:  Enzymatic Nucleic Acid
ucaguugauggcaugcacuaugcgcggcagguaacc

SEQ ID NO: 15073 - RNA, 36 nt, Artificial Sequence
  Description of Artificial Sequence:  Enzymatic Nucleic Acid
uuucuugauggcaugcacuaugcgcgagucgcaggu

SEQ ID NO: 15074 - RNA, 36 nt, Artificial Sequence
  Description of Artificial Sequence:  Enzymatic Nucleic Acid
gcgagugauggcaugcacuaugcgcgagauuucuca

SEQ ID NO: 15075 - RNA, 36 nt, Artificial Sequence
  Description of Artificial Sequence:  Enzymatic Nucleic Acid
aauagugauggcaugcacuaugcgcggagcagauuu

SEQ ID NO: 15076 - RNA, 36 nt, Artificial Sequence
  Description of Artificial Sequence:  Enzymatic Nucleic Acid
cgaguugauggcaugcacuaugcgcgaaauagcgag

SEQ ID NO: 15077 - RNA, 36 nt, Artificial Sequence
  Description of Artificial Sequence:  Enzymatic Nucleic Acid
cucuuugauggcaugcacuaugcgcgaguuacgucc

SEQ ID NO: 15078 - RNA, 36 nt, Artificial Sequence
  Description of Artificial Sequence:  Enzymatic Nucleic Acid
cccugugauggcaugcacuaugcgcgauccucuuca

SEQ ID NO: 15079 - RNA, 36 nt, Artificial Sequence
  Description of Artificial Sequence:  Enzymatic Nucleic Acid
cucagugauggcaugcacuaugcgcgaagauuguau

SEQ ID NO: 15080 - RNA, 36 nt, Artificial Sequence
  Description of Artificial Sequence:  Enzymatic Nucleic Acid
augcuugauggcaugcacuaugcgcgagcaagauug

SEQ ID NO: 15081 - RNA, 36 nt, Artificial Sequence
  Description of Artificial Sequence:  Enzymatic Nucleic Acid
aaacaugauggcaugcacuaugcgcgauuugacugu

SEQ ID NO: 15082 - RNA, 36 nt, Artificial Sequence
  Description of Artificial Sequence:  Enzymatic Nucleic Acid
uuaaaugauggcaugcacuaugcgcgacauuugacu

SEQ ID NO: 15083 - RNA, 36 nt, Artificial Sequence
  Description of Artificial Sequence:  Enzymatic Nucleic Acid
aguggugauggcaugcacuaugcgcgagugagguuu

SEQ ID NO: 15084 - RNA, 36 nt, Artificial Sequence
  Description of Artificial Sequence:  Enzymatic Nucleic Acid
auugaugauggcaugcacuaugcgcgaauuagagug

SEQ ID NO: 15085 - RNA, 36 nt, Artificial Sequence
  Description of Artificial Sequence:  Enzymatic Nucleic Acid
uuucaugauggcaugcacuaugcgcgauugacaauu

SEQ ID NO: 15086 - RNA, 36 nt, Artificial Sequence
  Description of Artificial Sequence:  Enzymatic Nucleic Acid
gguuuugauggcaugcacuaugcgcgacauugacaa

SEQ ID NO: 15087 - RNA, 36 nt, Artificial Sequence
  Description of Artificial Sequence:  Enzymatic Nucleic Acid
cuuuuugauggcaugcacuaugcgcgguaaaucugg

SEQ ID NO: 15088 - RNA, 36 nt, Artificial Sequence
  Description of Artificial Sequence:  Enzymatic Nucleic Acid
gaugaugauggcaugcacuaugcgcgacggccuuuu

SEQ ID NO: 15089 - RNA, 36 nt, Artificial Sequence
  Description of Artificial Sequence:  Enzymatic Nucleic Acid
caaguugauggcaugcacuaugcgcgaggauuuguc

SEQ ID NO: 15090 - RNA, 36 nt, Artificial Sequence
  Description of Artificial Sequence:  Enzymatic Nucleic Acid
cgguaugauggcaugcacuaugcgcgaagucaggau

SEQ ID NO: 15091 - RNA, 36 nt, Artificial Sequence
  Description of Artificial Sequence:  Enzymatic Nucleic Acid
auaugugauggcaugcacuaugcgcggguacaaguc

SEQ ID NO: 15092 - RNA, 36 nt, Artificial Sequence
  Description of Artificial Sequence:  Enzymatic Nucleic Acid
gguuaugauggcaugcacuaugcgcgaggggugcca

SEQ ID NO: 15093 - RNA, 36 nt, Artificial Sequence
  Description of Artificial Sequence:  Enzymatic Nucleic Acid
ugcuuugauggcaugcacuaugcgcgggaaugauua

SEQ ID NO: 15094 - RNA, 36 nt, Artificial Sequence
  Description of Artificial Sequence:  Enzymatic Nucleic Acid
agucaugauggcaugcacuaugcgcgaccuugcuuc

SEQ ID NO: 15095 - RNA, 36 nt, Artificial Sequence
  Description of Artificial Sequence:  Enzymatic Nucleic Acid
aaaguugauggcaugcacuaugcgcgacaccuugcu

SEQ ID NO: 15096 - RNA, 36 nt, Artificial Sequence
  Description of Artificial Sequence:  Enzymatic Nucleic Acid
uggaaugauggcaugcacuaugcgcgaaaagucaca

SEQ ID NO: 15097 - RNA, 36 nt, Artificial Sequence
  Description of Artificial Sequence:  Enzymatic Nucleic Acid
cucuuugauggcaugcacuaugcgcgauuauuggaa

SEQ ID NO: 15098 - RNA, 36 nt, Artificial Sequence
  Description of Artificial Sequence:  Enzymatic Nucleic Acid
gucagugauggcaugcacuaugcgcgauccaggaua

SEQ ID NO: 15099 - RNA, 36 nt, Artificial Sequence
  Description of Artificial Sequence:  Enzymatic Nucleic Acid
gcuguugauggcaugcacuaugcgcgagcauccagg

SEQ ID NO: 15100 - RNA, 36 nt, Artificial Sequence
  Description of Artificial Sequence:  Enzymatic Nucleic Acid
gcucuugauggcaugcacuaugcgcgaauucuguuu

SEQ ID NO: 15101 - RNA, 36 nt, Artificial Sequence
  Description of Artificial Sequence:  Enzymatic Nucleic Acid
ccaugugauggcaugcacuaugcgcggcugagugau

SEQ ID NO: 15102 - RNA, 36 nt, Artificial Sequence
  Description of Artificial Sequence:  Enzymatic Nucleic Acid
agccaugauggcaugcacuaugcgcgaaccaaggug

SEQ ID NO: 15103 - RNA, 36 nt, Artificial Sequence
  Description of Artificial Sequence:  Enzymatic Nucleic Acid
agaguugauggcaugcacuaugcgcgagccacaacc

SEQ ID NO: 15104 - RNA, 36 nt, Artificial Sequence
  Description of Artificial Sequence:  Enzymatic Nucleic Acid
cuaugugauggcaugcacuaugcgcgaaauguagau

SEQ ID NO: 15105 - RNA, 36 nt, Artificial Sequence
  Description of Artificial Sequence:  Enzymatic Nucleic Acid
ucccaugauggcaugcacuaugcgcgagucccaacu

SEQ ID NO: 15106 - RNA, 36 nt, Artificial Sequence
  Description of Artificial Sequence:  Enzymatic Nucleic Acid
uggcaugauggcaugcacuaugcgcgaucugugaua

SEQ ID NO: 15107 - RNA, 36 nt, Artificial Sequence
  Description of Artificial Sequence:  Enzymatic Nucleic Acid
uuuggugauggcaugcacuaugcgcgacaucuguga

SEQ ID NO: 15108 - RNA, 36 nt, Artificial Sequence
  Description of Artificial Sequence:  Enzymatic Nucleic Acid
guuaaugauggcaugcacuaugcgcgaugaaaccca

SEQ ID NO: 15109 - RNA, 36 nt, Artificial Sequence
  Description of Artificial Sequence:  Enzymatic Nucleic Acid
gucggugauggcaugcacuaugcgcgauuuuuucca

SEQ ID NO: 15110 - RNA, 36 nt, Artificial Sequence
  Description of Artificial Sequence:  Enzymatic Nucleic Acid
uccguugauggcaugcacuaugcgcgggcauuuuuu

SEQ ID NO: 15111 - RNA, 36 nt, Artificial Sequence
  Description of Artificial Sequence:  Enzymatic Nucleic Acid
aguuuugauggcaugcacuaugcgcgagguccucuc

SEQ ID NO: 15112 - RNA, 36 nt, Artificial Sequence
  Description of Artificial Sequence:  Enzymatic Nucleic Acid
caagaugauggcaugcacuaugcgcgaguuucaggu

SEQ ID NO: 15113 - RNA, 36 nt, Artificial Sequence
  Description of Artificial Sequence:  Enzymatic Nucleic Acid
cugugugauggcaugcacuaugcgcgaagacaguuu

SEQ ID NO: 15114 - RNA, 36 nt, Artificial Sequence
  Description of Artificial Sequence:  Enzymatic Nucleic Acid
guccgugauggcaugcacuaugcgcgaguaaaaucc

SEQ ID NO: 15115 - RNA, 36 nt, Artificial Sequence
  Description of Artificial Sequence:  Enzymatic Nucleic Acid
uagugugauggcaugcacuaugcgcgauuguucugu

SEQ ID NO: 15116 - RNA, 36 nt, Artificial Sequence
  Description of Artificial Sequence:  Enzymatic Nucleic Acid
acauuugauggcaugcacuaugcgcgaugaugguaa

SEQ ID NO: 15117 - RNA, 36 nt, Artificial Sequence
  Description of Artificial Sequence:  Enzymatic Nucleic Acid
ggaaaugauggcaugcacuaugcgcgauucaugaug

SEQ ID NO: 15118 - RNA, 36 nt, Artificial Sequence
  Description of Artificial Sequence:  Enzymatic Nucleic Acid
ucuugugauggcaugcacuaugcgcgagggaaacau

SEQ ID NO: 15119 - RNA, 36 nt, Artificial Sequence
  Description of Artificial Sequence:  Enzymatic Nucleic Acid
gcaggugauggcaugcacuaugcgcgauaggugccu

SEQ ID NO: 15120 - RNA, 36 nt, Artificial Sequence
  Description of Artificial Sequence:  Enzymatic Nucleic Acid
cucugugauggcaugcacuaugcgcgaggcauaggu

SEQ ID NO: 15121 - RNA, 36 nt, Artificial Sequence
  Description of Artificial Sequence:  Enzymatic Nucleic Acid
guauaugauggcaugcacuaugcgcgauuccuggcu

SEQ ID NO: 15122 - RNA, 36 nt, Artificial Sequence
  Description of Artificial Sequence:  Enzymatic Nucleic Acid
uuucgugauggcaugcacuaugcgcgaggagguaug

SEQ ID NO: 15123 - RNA, 36 nt, Artificial Sequence
  Description of Artificial Sequence:  Enzymatic Nucleic Acid
gguuuugauggcaugcacuaugcgcggcaggaggua

SEQ ID NO: 15124 - RNA, 36 nt, Artificial Sequence
  Description of Artificial Sequence:  Enzymatic Nucleic Acid
gugauugauggcaugcacuaugcgcgacugagguuu

SEQ ID NO: 15125 - RNA, 36 nt, Artificial Sequence
  Description of Artificial Sequence:  Enzymatic Nucleic Acid
caugaugauggcaugcacuaugcgcgagucuaaagu

SEQ ID NO: 15126 - RNA, 36 nt, Artificial Sequence
  Description of Artificial Sequence:  Enzymatic Nucleic Acid
auuagugauggcaugcacuaugcgcgaugacagucu

SEQ ID NO: 15127 - RNA, 36 nt, Artificial Sequence
  Description of Artificial Sequence:  Enzymatic Nucleic Acid
ggggaugauggcaugcacuaugcgcgaccauuagca

SEQ ID NO: 15128 - RNA, 36 nt, Artificial Sequence
  Description of Artificial Sequence:  Enzymatic Nucleic Acid
aggcuugauggcaugcacuaugcgcgggggacacca

SEQ ID NO: 15129 - RNA, 36 nt, Artificial Sequence
  Description of Artificial Sequence:  Enzymatic Nucleic Acid
aacagugauggcaugcacuaugcgcggugcugcuuc

SEQ ID NO: 15130 - RNA, 36 nt, Artificial Sequence
  Description of Artificial Sequence:  Enzymatic Nucleic Acid
auaaaugauggcaugcacuaugcgcgagcgugcugc

SEQ ID NO: 15131 - RNA, 36 nt, Artificial Sequence
  Description of Artificial Sequence:  Enzymatic Nucleic Acid
ucuuuugauggcaugcacuaugcgcgaauaaacagc

SEQ ID NO: 15132 - RNA, 36 nt, Artificial Sequence
  Description of Artificial Sequence:  Enzymatic Nucleic Acid
accuuugauggcaugcacuaugcgcgauccucuucu

SEQ ID NO: 15133 - RNA, 36 nt, Artificial Sequence
  Description of Artificial Sequence:  Enzymatic Nucleic Acid
auagaugauggcaugcacuaugcgcgaccuucaucc

SEQ ID NO: 15134 - RNA, 36 nt, Artificial Sequence
  Description of Artificial Sequence:  Enzymatic Nucleic Acid
cuuugugauggcaugcacuaugcgcgagugauagac

SEQ ID NO: 15135 - RNA, 36 nt, Artificial Sequence
  Description of Artificial Sequence:  Enzymatic Nucleic Acid
uuccaugauggcaugcacuaugcgcgagagcccuuc

SEQ ID NO: 15136 - RNA, 36 nt, Artificial Sequence
  Description of Artificial Sequence:  Enzymatic Nucleic Acid
uugaaugauggcaugcacuaugcgcgagugagguau

SEQ ID NO: 15137 - RNA, 36 nt, Artificial Sequence
  Description of Artificial Sequence:  Enzymatic Nucleic Acid
gugauugauggcaugcacuaugcgcgagcuccagau

SEQ ID NO: 15138 - RNA, 36 nt, Artificial Sequence
  Description of Artificial Sequence:  Enzymatic Nucleic Acid
aggugugauggcaugcacuaugcgcgauguuagagu

SEQ ID NO: 15139 - RNA, 36 nt, Artificial Sequence
  Description of Artificial Sequence:  Enzymatic Nucleic Acid
ccacaugauggcaugcacuaugcgcgaggugcaugu

SEQ ID NO: 15140 - RNA, 36 nt, Artificial Sequence
  Description of Artificial Sequence:  Enzymatic Nucleic Acid
agccaugauggcaugcacuaugcgcgacaggugcau

SEQ ID NO: 15141 - RNA, 36 nt, Artificial Sequence
  Description of Artificial Sequence:  Enzymatic Nucleic Acid
agucgugauggcaugcacuaugcgcgagccacacag

SEQ ID NO: 15142 - RNA, 36 nt, Artificial Sequence
  Description of Artificial Sequence:  Enzymatic Nucleic Acid
agaguugauggcaugcacuaugcgcggcagccacac

SEQ ID NO: 15143 - RNA, 36 nt, Artificial Sequence
  Description of Artificial Sequence:  Enzymatic Nucleic Acid
uuuuuugauggcaugcacuaugcgcgggauaaggag

SEQ ID NO: 15144 - RNA, 36 nt, Artificial Sequence
  Description of Artificial Sequence:  Enzymatic Nucleic Acid
cuuuuugauggcaugcacuaugcgcgauuuuucgga

SEQ ID NO: 15145 - RNA, 36 nt, Artificial Sequence
  Description of Artificial Sequence:  Enzymatic Nucleic Acid
uauuuugauggcaugcacuaugcgcgagaagaagac

SEQ ID NO: 15146 - RNA, 36 nt, Artificial Sequence
  Description of Artificial Sequence:  Enzymatic Nucleic Acid
guaguugauggcaugcacuaugcgcgagucuuuauu

SEQ ID NO: 15147 - RNA, 36 nt, Artificial Sequence
  Description of Artificial Sequence:  Enzymatic Nucleic Acid
aacuuugauggcaugcacuaugcgcgaucugggucc

SEQ ID NO: 15148 - RNA, 36 nt, Artificial Sequence
  Description of Artificial Sequence:  Enzymatic Nucleic Acid
cugcuugauggcaugcacuaugcgcgauccaaagga

SEQ ID NO: 15149 - RNA, 36 nt, Artificial Sequence
  Description of Artificial Sequence:  Enzymatic Nucleic Acid
gcucaugauggcaugcacuaugcgcgacugcucauc

SEQ ID NO: 15150 - RNA, 36 nt, Artificial Sequence
  Description of Artificial Sequence:  Enzymatic Nucleic Acid
ccgcuugauggcaugcacuaugcgcgacacugcuca

SEQ ID NO: 15151 - RNA, 36 nt, Artificial Sequence
  Description of Artificial Sequence:  Enzymatic Nucleic Acid
ggcauugauggcaugcacuaugcgcgauaagggagc

SEQ ID NO: 15152 - RNA, 36 nt, Artificial Sequence
  Description of Artificial Sequence:  Enzymatic Nucleic Acid
gcuggugauggcaugcacuaugcgcgaucauaaggg

SEQ ID NO: 15153 - RNA, 36 nt, Artificial Sequence
  Description of Artificial Sequence:  Enzymatic Nucleic Acid
ccgggugauggcaugcacuaugcgcgaaacucccac

SEQ ID NO: 15154 - RNA, 36 nt, Artificial Sequence
  Description of Artificial Sequence:  Enzymatic Nucleic Acid
uccggugauggcaugcacuaugcgcgacguagguga

SEQ ID NO: 15155 - RNA, 36 nt, Artificial Sequence
  Description of Artificial Sequence:  Enzymatic Nucleic Acid
agccaugauggcaugcacuaugcgcgaguccggcac

SEQ ID NO: 15156 - RNA, 36 nt, Artificial Sequence
  Description of Artificial Sequence:  Enzymatic Nucleic Acid
uuucaugauggcaugcacuaugcgcgagccacaguc

SEQ ID NO: 15157 - RNA, 36 nt, Artificial Sequence
  Description of Artificial Sequence:  Enzymatic Nucleic Acid
auuuuugauggcaugcacuaugcgcgacagccacag

SEQ ID NO: 15158 - RNA, 36 nt, Artificial Sequence
  Description of Artificial Sequence:  Enzymatic Nucleic Acid
uucagugauggcaugcacuaugcgcgauuuucacag

SEQ ID NO: 15159 - RNA, 36 nt, Artificial Sequence
  Description of Artificial Sequence:  Enzymatic Nucleic Acid
ucuuuugauggcaugcacuaugcgcgagcauuuuca

SEQ ID NO: 15160 - RNA, 36 nt, Artificial Sequence
  Description of Artificial Sequence:  Enzymatic Nucleic Acid
guacuugauggcaugcacuaugcgcggcuggccgug

SEQ ID NO: 15161 - RNA, 36 nt, Artificial Sequence
  Description of Artificial Sequence:  Enzymatic Nucleic Acid
gucauugauggcaugcacuaugcgcgagagcuuugu

SEQ ID NO: 15162 - RNA, 36 nt, Artificial Sequence
  Description of Artificial Sequence:  Enzymatic Nucleic Acid
ucaguugauggcaugcacuaugcgcgaucagagcuu

SEQ ID NO: 15163 - RNA, 36 nt, Artificial Sequence
  Description of Artificial Sequence:  Enzymatic Nucleic Acid
uagcuugauggcaugcacuaugcgcgagucaucaga

SEQ ID NO: 15164 - RNA, 36 nt, Artificial Sequence
  Description of Artificial Sequence:  Enzymatic Nucleic Acid
uggguugauggcaugcacuaugcgcgaagauuuuua

SEQ ID NO: 15165 - RNA, 36 nt, Artificial Sequence
  Description of Artificial Sequence:  Enzymatic Nucleic Acid
acguuugauggcaugcacuaugcgcgagaugguggc

SEQ ID NO: 15166 - RNA, 36 nt, Artificial Sequence
  Description of Artificial Sequence:  Enzymatic Nucleic Acid
cccagugauggcaugcacuaugcgcgagguuaacca

SEQ ID NO: 15167 - RNA, 36 nt, Artificial Sequence
  Description of Artificial Sequence:  Enzymatic Nucleic Acid
uggugugauggcaugcacuaugcgcgaggcucccag

SEQ ID NO: 15168 - RNA, 36 nt, Artificial Sequence
  Description of Artificial Sequence:  Enzymatic Nucleic Acid
accauugauggcaugcacuaugcgcgagaggcccuc

SEQ ID NO: 15169 - RNA, 36 nt, Artificial Sequence
  Description of Artificial Sequence:  Enzymatic Nucleic Acid
acaauugauggcaugcacuaugcgcgaccaucagag

SEQ ID NO: 15170 - RNA, 36 nt, Artificial Sequence
  Description of Artificial Sequence:  Enzymatic Nucleic Acid
uucaaugauggcaugcacuaugcgcgaaucaccauc

SEQ ID NO: 15171 - RNA, 36 nt, Artificial Sequence
  Description of Artificial Sequence:  Enzymatic Nucleic Acid
guauuugauggcaugcacuaugcgcgaacaaucacc

SEQ ID NO: 15172 - RNA, 36 nt, Artificial Sequence
  Description of Artificial Sequence:  Enzymatic Nucleic Acid
auuugugauggcaugcacuaugcgcgaguauucaac

SEQ ID NO: 15173 - RNA, 36 nt, Artificial Sequence
  Description of Artificial Sequence:  Enzymatic Nucleic Acid
uaaguugauggcaugcacuaugcgcgacguuugcuc

SEQ ID NO: 15174 - RNA, 36 nt, Artificial Sequence
  Description of Artificial Sequence:  Enzymatic Nucleic Acid
ugcugugauggcaugcacuaugcgcgauccuuguug

SEQ ID NO: 15175 - RNA, 36 nt, Artificial Sequence
  Description of Artificial Sequence:  Enzymatic Nucleic Acid
gcuuuugauggcaugcacuaugcgcggcugcuggug

SEQ ID NO: 15176 - RNA, 36 nt, Artificial Sequence
  Description of Artificial Sequence:  Enzymatic Nucleic Acid
gcucgugauggcaugcacuaugcgcgaaagcuuucg

SEQ ID NO: 15177 - RNA, 36 nt, Artificial Sequence
  Description of Artificial Sequence:  Enzymatic Nucleic Acid
gagcuugauggcaugcacuaugcgcggcaaagcuuu

SEQ ID NO: 15178 - RNA, 36 nt, Artificial Sequence
  Description of Artificial Sequence:  Enzymatic Nucleic Acid
ucacuugauggcaugcacuaugcgcgagacuuuuau

SEQ ID NO: 15179 - RNA, 36 nt, Artificial Sequence
  Description of Artificial Sequence:  Enzymatic Nucleic Acid
aacauugauggcaugcacuaugcgcgacucagacuu

SEQ ID NO: 15180 - RNA, 36 nt, Artificial Sequence
  Description of Artificial Sequence:  Enzymatic Nucleic Acid
cucaaugauggcaugcacuaugcgcgaucacucaga

SEQ ID NO: 15181 - RNA, 36 nt, Artificial Sequence
  Description of Artificial Sequence:  Enzymatic Nucleic Acid
uuccuugauggcaugcacuaugcgcgaacaucacuc

SEQ ID NO: 15182 - RNA, 36 nt, Artificial Sequence
  Description of Artificial Sequence:  Enzymatic Nucleic Acid
accguugauggcaugcacuaugcgcgagaauccucc

SEQ ID NO: 15183 - RNA, 36 nt, Artificial Sequence
  Description of Artificial Sequence:  Enzymatic Nucleic Acid
gaaauugauggcaugcacuaugcgcgagaucuucca

SEQ ID NO: 15184 - RNA, 36 nt, Artificial Sequence
  Description of Artificial Sequence:  Enzymatic Nucleic Acid
gaagaugauggcaugcacuaugcgcgaggaacucca

SEQ ID NO: 15185 - RNA, 36 nt, Artificial Sequence
  Description of Artificial Sequence:  Enzymatic Nucleic Acid
gaaugugauggcaugcacuaugcgcgacuuucugga

SEQ ID NO: 15186 - RNA, 36 nt, Artificial Sequence
  Description of Artificial Sequence:  Enzymatic Nucleic Acid
uuucuugauggcaugcacuaugcgcggcugccaggu

SEQ ID NO: 15187 - RNA, 36 nt, Artificial Sequence
  Description of Artificial Sequence:  Enzymatic Nucleic Acid
guucuugauggcaugcacuaugcgcgagauaaaaga

SEQ ID NO: 15188 - RNA, 36 nt, Artificial Sequence
  Description of Artificial Sequence:  Enzymatic Nucleic Acid
aucuuugauggcaugcacuaugcgcgaccacguugu

SEQ ID NO: 15189 - RNA, 36 nt, Artificial Sequence
  Description of Artificial Sequence:  Enzymatic Nucleic Acid
aaucaugauggcaugcacuaugcgcgaaaucuucac

SEQ ID NO: 15190 - RNA, 36 nt, Artificial Sequence
  Description of Artificial Sequence:  Enzymatic Nucleic Acid
aaaauugauggcaugcacuaugcgcgacaaaucuuc

SEQ ID NO: 15191 - RNA, 36 nt, Artificial Sequence
  Description of Artificial Sequence:  Enzymatic Nucleic Acid
ccgggugauggcaugcacuaugcgcgaaggccaaaa

SEQ ID NO: 15192 - RNA, 36 nt, Artificial Sequence
  Description of Artificial Sequence:  Enzymatic Nucleic Acid
auaauugauggcaugcacuaugcgcggggguucuua

SEQ ID NO: 15193 - RNA, 36 nt, Artificial Sequence
  Description of Artificial Sequence:  Enzymatic Nucleic Acid
ucucaugauggcaugcacuaugcgcgauaaucgggg

SEQ ID NO: 15194 - RNA, 36 nt, Artificial Sequence
  Description of Artificial Sequence:  Enzymatic Nucleic Acid
uuucuugauggcaugcacuaugcgcgacauaaucgg

SEQ ID NO: 15195 - RNA, 36 nt, Artificial Sequence
  Description of Artificial Sequence:  Enzymatic Nucleic Acid
gaaguugauggcaugcacuaugcgcggaguaucucc

SEQ ID NO: 15196 - RNA, 36 nt, Artificial Sequence
  Description of Artificial Sequence:  Enzymatic Nucleic Acid
cauuuugauggcaugcacuaugcgcgagaggaaguc

SEQ ID NO: 15197 - RNA, 36 nt, Artificial Sequence
  Description of Artificial Sequence:  Enzymatic Nucleic Acid
agauuugauggcaugcacuaugcgcggggagccauc

SEQ ID NO: 15198 - RNA, 36 nt, Artificial Sequence
  Description of Artificial Sequence:  Enzymatic Nucleic Acid
uuuguugauggcaugcacuaugcgcgaaagauagau

SEQ ID NO: 15199 - RNA, 36 nt, Artificial Sequence
  Description of Artificial Sequence:  Enzymatic Nucleic Acid
cacguugauggcaugcacuaugcgcggcucuuggug

SEQ ID NO: 15200 - RNA, 36 nt, Artificial Sequence
  Description of Artificial Sequence:  Enzymatic Nucleic Acid
gaccaugauggcaugcacuaugcgcgacgucgcucu

SEQ ID NO: 15201 - RNA, 36 nt, Artificial Sequence
  Description of Artificial Sequence:  Enzymatic Nucleic Acid
cacagugauggcaugcacuaugcgcgaauacuccgu

SEQ ID NO: 15202 - RNA, 36 nt, Artificial Sequence
  Description of Artificial Sequence:  Enzymatic Nucleic Acid
ucccaugauggcaugcacuaugcgcgagcaauacuc

SEQ ID NO: 15203 - RNA, 36 nt, Artificial Sequence
  Description of Artificial Sequence:  Enzymatic Nucleic Acid
guccuugauggcaugcacuaugcgcgauccauuugu

SEQ ID NO: 15204 - RNA, 36 nt, Artificial Sequence
  Description of Artificial Sequence:  Enzymatic Nucleic Acid
gacugugauggcaugcacuaugcgcgaaaaguccuc

SEQ ID NO: 15205 - RNA, 36 nt, Artificial Sequence
  Description of Artificial Sequence:  Enzymatic Nucleic Acid
ucaggugauggcaugcacuaugcgcggacugcaaaa

SEQ ID NO: 15206 - RNA, 36 nt, Artificial Sequence
  Description of Artificial Sequence:  Enzymatic Nucleic Acid
ucccuugauggcaugcacuaugcgcgaggcgacugc

SEQ ID NO: 15207 - RNA, 36 nt, Artificial Sequence
  Description of Artificial Sequence:  Enzymatic Nucleic Acid
auccuugauggcaugcacuaugcgcgaugccuuccc

SEQ ID NO: 15208 - RNA, 36 nt, Artificial Sequence
  Description of Artificial Sequence:  Enzymatic Nucleic Acid
gcucuugauggcaugcacuaugcgcgauccucaugc

SEQ ID NO: 15209 - RNA, 36 nt, Artificial Sequence
  Description of Artificial Sequence:  Enzymatic Nucleic Acid
guacuugauggcaugcacuaugcgcgaggagcucuc

SEQ ID NO: 15210 - RNA, 36 nt, Artificial Sequence
  Description of Artificial Sequence:  Enzymatic Nucleic Acid
gauuuugauggcaugcacuaugcgcgaggaguagag

SEQ ID NO: 15211 - RNA, 36 nt, Artificial Sequence
  Description of Artificial Sequence:  Enzymatic Nucleic Acid
uccagugauggcaugcacuaugcgcgaugaucugau

SEQ ID NO: 15212 - RNA, 36 nt, Artificial Sequence
  Description of Artificial Sequence:  Enzymatic Nucleic Acid
gccagugauggcaugcacuaugcgcgaguccagcau

SEQ ID NO: 15213 - RNA, 36 nt, Artificial Sequence
  Description of Artificial Sequence:  Enzymatic Nucleic Acid
uucugugauggcaugcacuaugcgcgaaaucuuggc

SEQ ID NO: 15214 - RNA, 36 nt, Artificial Sequence
  Description of Artificial Sequence:  Enzymatic Nucleic Acid
uuccaugauggcaugcacuaugcgcgaaguucugca

SEQ ID NO: 15215 - RNA, 36 nt, Artificial Sequence
  Description of Artificial Sequence:  Enzymatic Nucleic Acid
caaauugauggcaugcacuaugcgcgaccuaguuuu

SEQ ID NO: 15216 - RNA, 36 nt, Artificial Sequence
  Description of Artificial Sequence:  Enzymatic Nucleic Acid
ugaagugauggcaugcacuaugcgcgaaaucaccua

SEQ ID NO: 15217 - RNA, 36 nt, Artificial Sequence
  Description of Artificial Sequence:  Enzymatic Nucleic Acid
uuguaugauggcaugcacuaugcgcgauuugcuuga

SEQ ID NO: 15218 - RNA, 36 nt, Artificial Sequence
  Description of Artificial Sequence:  Enzymatic Nucleic Acid
uauggugauggcaugcacuaugcgcgauugauuggg

SEQ ID NO: 15219 - RNA, 36 nt, Artificial Sequence
  Description of Artificial Sequence:  Enzymatic Nucleic Acid
ccuguugauggcaugcacuaugcgcgaguauggcau

SEQ ID NO: 15220 - RNA, 36 nt, Artificial Sequence
  Description of Artificial Sequence:  Enzymatic Nucleic Acid
gaaggugauggcaugcacuaugcgcgaggaguugag

SEQ ID NO: 15221 - RNA, 36 nt, Artificial Sequence
  Description of Artificial Sequence:  Enzymatic Nucleic Acid
guccuugauggcaugcacuaugcgcgagagaaggca

SEQ ID NO: 15222 - RNA, 36 nt, Artificial Sequence
  Description of Artificial Sequence:  Enzymatic Nucleic Acid
aacuuugauggcaugcacuaugcgcgggagcugaaa

SEQ ID NO: 15223 - RNA, 36 nt, Artificial Sequence
  Description of Artificial Sequence:  Enzymatic Nucleic Acid
aucauugauggcaugcacuaugcgcgagagcuuccu

SEQ ID NO: 15224 - RNA, 36 nt, Artificial Sequence
  Description of Artificial Sequence:  Enzymatic Nucleic Acid
gacauugauggcaugcacuaugcgcgaucagagcuu

SEQ ID NO: 15225 - RNA, 36 nt, Artificial Sequence
  Description of Artificial Sequence:  Enzymatic Nucleic Acid
ucugaugauggcaugcacuaugcgcgaucaucagag

SEQ ID NO: 15226 - RNA, 36 nt, Artificial Sequence
  Description of Artificial Sequence:  Enzymatic Nucleic Acid
auuuaugauggcaugcacuaugcgcgauaucugaca

SEQ ID NO: 15227 - RNA, 36 nt, Artificial Sequence
  Description of Artificial Sequence:  Enzymatic Nucleic Acid
gaaagugauggcaugcacuaugcgcgauuuacauau

SEQ ID NO: 15228 - RNA, 36 nt, Artificial Sequence
  Description of Artificial Sequence:  Enzymatic Nucleic Acid
aggcuugauggcaugcacuaugcgcgaugaacuuga

SEQ ID NO: 15229 - RNA, 36 nt, Artificial Sequence
  Description of Artificial Sequence:  Enzymatic Nucleic Acid
uucuuugauggcaugcacuaugcgcgaaagguuuug

SEQ ID NO: 15230 - RNA, 36 nt, Artificial Sequence
  Description of Artificial Sequence:  Enzymatic Nucleic Acid
gcauuugauggcaugcacuaugcgcggguaaaaguu

SEQ ID NO: 15231 - RNA, 36 nt, Artificial Sequence
  Description of Artificial Sequence:  Enzymatic Nucleic Acid
gguggugauggcaugcacuaugcgcgauucgguaaa

SEQ ID NO: 15232 - RNA, 36 nt, Artificial Sequence
  Description of Artificial Sequence:  Enzymatic Nucleic Acid
ucaaaugauggcaugcacuaugcgcgauggaggugg

SEQ ID NO: 15233 - RNA, 36 nt, Artificial Sequence
  Description of Artificial Sequence:  Enzymatic Nucleic Acid
gucauugauggcaugcacuaugcgcgaaacauggag

SEQ ID NO: 15234 - RNA, 36 nt, Artificial Sequence
  Description of Artificial Sequence:  Enzymatic Nucleic Acid
guaguugauggcaugcacuaugcgcgaucaaacaug

SEQ ID NO: 15235 - RNA, 36 nt, Artificial Sequence
  Description of Artificial Sequence:  Enzymatic Nucleic Acid
gcuguugauggcaugcacuaugcgcggcccugguag

SEQ ID NO: 15236 - RNA, 36 nt, Artificial Sequence
  Description of Artificial Sequence:  Enzymatic Nucleic Acid
gccaaugauggcaugcacuaugcgcgagagugcugc

SEQ ID NO: 15237 - RNA, 36 nt, Artificial Sequence
  Description of Artificial Sequence:  Enzymatic Nucleic Acid
uucagugauggcaugcacuaugcgcgaugggagagg

SEQ ID NO: 15238 - RNA, 36 nt, Artificial Sequence
  Description of Artificial Sequence:  Enzymatic Nucleic Acid
cgcuuugauggcaugcacuaugcgcgagcaugggag

SEQ ID NO: 15239 - RNA, 36 nt, Artificial Sequence
  Description of Artificial Sequence:  Enzymatic Nucleic Acid
ugaagugauggcaugcacuaugcgcggcuucagcau

SEQ ID NO: 15240 - RNA, 36 nt, Artificial Sequence
  Description of Artificial Sequence:  Enzymatic Nucleic Acid
gcuguugauggcaugcacuaugcgcgaguccaggug

SEQ ID NO: 15241 - RNA, 36 nt, Artificial Sequence
  Description of Artificial Sequence:  Enzymatic Nucleic Acid
uugagugauggcaugcacuaugcgcggaggccuugg

SEQ ID NO: 15242 - RNA, 36 nt, Artificial Sequence
  Description of Artificial Sequence:  Enzymatic Nucleic Acid
caaguugauggcaugcacuaugcgcgaaucuugagc

SEQ ID NO: 15243 - RNA, 36 nt, Artificial Sequence
  Description of Artificial Sequence:  Enzymatic Nucleic Acid
acucuugauggcaugcacuaugcgcgaagucaaucu

SEQ ID NO: 15244 - RNA, 36 nt, Artificial Sequence
  Description of Artificial Sequence:  Enzymatic Nucleic Acid
ucagaugauggcaugcacuaugcgcgagccccgacu

SEQ ID NO: 15245 - RNA, 36 nt, Artificial Sequence
  Description of Artificial Sequence:  Enzymatic Nucleic Acid
gacauugauggcaugcacuaugcgcgagacagcccc

SEQ ID NO: 15246 - RNA, 36 nt, Artificial Sequence
  Description of Artificial Sequence:  Enzymatic Nucleic Acid
gcugaugauggcaugcacuaugcgcgaucagacagc

SEQ ID NO: 15247 - RNA, 36 nt, Artificial Sequence
  Description of Artificial Sequence:  Enzymatic Nucleic Acid
aauggugauggcaugcacuaugcgcgagaaacuggg

SEQ ID NO: 15248 - RNA, 36 nt, Artificial Sequence
  Description of Artificial Sequence:  Enzymatic Nucleic Acid
gcccaugauggcaugcacuaugcgcgagcuggaaug

SEQ ID NO: 15249 - RNA, 36 nt, Artificial Sequence
  Description of Artificial Sequence:  Enzymatic Nucleic Acid
gccuuugauggcaugcacuaugcgcggcugacgugc

SEQ ID NO: 15250 - RNA, 36 nt, Artificial Sequence
  Description of Artificial Sequence:  Enzymatic Nucleic Acid
accugugauggcaugcacuaugcgcggcuugccuuc

SEQ ID NO: 15251 - RNA, 36 nt, Artificial Sequence
  Description of Artificial Sequence:  Enzymatic Nucleic Acid
gugguugauggcaugcacuaugcgcgguaggugaac

SEQ ID NO: 15252 - RNA, 36 nt, Artificial Sequence
  Description of Artificial Sequence:  Enzymatic Nucleic Acid
cucagugauggcaugcacuaugcgcgguggucguag

SEQ ID NO: 15253 - RNA, 36 nt, Artificial Sequence
  Description of Artificial Sequence:  Enzymatic Nucleic Acid
cagcuugauggcaugcacuaugcgcgagcguggucg

SEQ ID NO: 15254 - RNA, 36 nt, Artificial Sequence
  Description of Artificial Sequence:  Enzymatic Nucleic Acid
gcacgugauggcaugcacuaugcgcggauuuuccuu

SEQ ID NO: 15255 - RNA, 36 nt, Artificial Sequence
  Description of Artificial Sequence:  Enzymatic Nucleic Acid
agcagugauggcaugcacuaugcgcgacgcgauuuu

SEQ ID NO: 15256 - RNA, 36 nt, Artificial Sequence
  Description of Artificial Sequence:  Enzymatic Nucleic Acid
gggagugauggcaugcacuaugcgcgagcacgcgau

SEQ ID NO: 15257 - RNA, 36 nt, Artificial Sequence
  Description of Artificial Sequence:  Enzymatic Nucleic Acid
gggggugauggcaugcacuaugcgcgggggagcagc

SEQ ID NO: 15258 - RNA, 36 nt, Artificial Sequence
  Description of Artificial Sequence:  Enzymatic Nucleic Acid
gaguaugauggcaugcacuaugcgcgaggaccaccg

SEQ ID NO: 15259 - RNA, 36 nt, Artificial Sequence
  Description of Artificial Sequence:  Enzymatic Nucleic Acid
cguguugauggcaugcacuaugcgcgaaacucuaga

SEQ ID NO: 15260 - RNA, 36 nt, Artificial Sequence
  Description of Artificial Sequence:  Enzymatic Nucleic Acid
ggcuuugauggcaugcacuaugcgcggugucaaacu

SEQ ID NO: 15261 - RNA, 36 nt, Artificial Sequence
  Description of Artificial Sequence:  Enzymatic Nucleic Acid
auacaugauggcaugcacuaugcgcgaugugcuucu

SEQ ID NO: 15262 - RNA, 36 nt, Artificial Sequence
  Description of Artificial Sequence:  Enzymatic Nucleic Acid
aaauaugauggcaugcacuaugcgcgacaugugcuu

SEQ ID NO: 15263 - RNA, 36 nt, Artificial Sequence
  Description of Artificial Sequence:  Enzymatic Nucleic Acid
acuggugauggcaugcacuaugcgcgaaaagcuagu

SEQ ID NO: 15264 - RNA, 36 nt, Artificial Sequence
  Description of Artificial Sequence:  Enzymatic Nucleic Acid
auaugugauggcaugcacuaugcgcgauaauacugg

SEQ ID NO: 15265 - RNA, 36 nt, Artificial Sequence
  Description of Artificial Sequence:  Enzymatic Nucleic Acid
aaaagugauggcaugcacuaugcgcgagcuggcucc

SEQ ID NO: 15266 - RNA, 36 nt, Artificial Sequence
  Description of Artificial Sequence:  Enzymatic Nucleic Acid
aaucaugauggcaugcacuaugcgcgaaaaagcagc

SEQ ID NO: 15267 - RNA, 36 nt, Artificial Sequence
  Description of Artificial Sequence:  Enzymatic Nucleic Acid
aaaauugauggcaugcacuaugcgcgacaaaaagca

SEQ ID NO: 15268 - RNA, 36 nt, Artificial Sequence
  Description of Artificial Sequence:  Enzymatic Nucleic Acid
aaaagugauggcaugcacuaugcgcgacuauuaaaa

SEQ ID NO: 15269 - RNA, 36 nt, Artificial Sequence
  Description of Artificial Sequence:  Enzymatic Nucleic Acid
uuaguugauggcaugcacuaugcgcgaaaaaaaaaa

SEQ ID NO: 15270 - RNA, 36 nt, Artificial Sequence
  Description of Artificial Sequence:  Enzymatic Nucleic Acid
aguuaugauggcaugcacuaugcgcgauucuuguua

SEQ ID NO: 15271 - RNA, 36 nt, Artificial Sequence
  Description of Artificial Sequence:  Enzymatic Nucleic Acid
cuuguugauggcaugcacuaugcgcgacuauuucuc

SEQ ID NO: 15272 - RNA, 36 nt, Artificial Sequence
  Description of Artificial Sequence:  Enzymatic Nucleic Acid
uucuuugauggcaugcacuaugcgcgacuugucacu

SEQ ID NO: 15273 - RNA, 36 nt, Artificial Sequence
  Description of Artificial Sequence:  Enzymatic Nucleic Acid
uuuagugauggcaugcacuaugcgcgaguaguguuc

SEQ ID NO: 15274 - RNA, 36 nt, Artificial Sequence
  Description of Artificial Sequence:  Enzymatic Nucleic Acid
aguaaugauggcaugcacuaugcgcgaugaggauuu

SEQ ID NO: 15275 - RNA, 36 nt, Artificial Sequence
  Description of Artificial Sequence:  Enzymatic Nucleic Acid
ucuaaugauggcaugcacuaugcgcgacugaguaac

SEQ ID NO: 15276 - RNA, 36 nt, Artificial Sequence
  Description of Artificial Sequence:  Enzymatic Nucleic Acid
gaaguugauggcaugcacuaugcgcgauuggguuua

SEQ ID NO: 15277 - RNA, 36 nt, Artificial Sequence
  Description of Artificial Sequence:  Enzymatic Nucleic Acid
uggagugauggcaugcacuaugcgcgagggaaguca

SEQ ID NO: 15278 - RNA, 36 nt, Artificial Sequence
  Description of Artificial Sequence:  Enzymatic Nucleic Acid
gguggugauggcaugcacuaugcgcgggggguugga

SEQ ID NO: 15279 - RNA, 36 nt, Artificial Sequence
  Description of Artificial Sequence:  Enzymatic Nucleic Acid
uccugugauggcaugcacuaugcgcggugcccugag

SEQ ID NO: 15280 - RNA, 36 nt, Artificial Sequence
  Description of Artificial Sequence:  Enzymatic Nucleic Acid
ucaauugauggcaugcacuaugcgcgaaacuggucc

SEQ ID NO: 15281 - RNA, 36 nt, Artificial Sequence
  Description of Artificial Sequence:  Enzymatic Nucleic Acid
cuccuugauggcaugcacuaugcgcgaaucaaacug

SEQ ID NO: 15282 - RNA, 36 nt, Artificial Sequence
  Description of Artificial Sequence:  Enzymatic Nucleic Acid
cagugugauggcaugcacuaugcgcgagcuccucaa

SEQ ID NO: 15283 - RNA, 36 nt, Artificial Sequence
  Description of Artificial Sequence:  Enzymatic Nucleic Acid
gugauugauggcaugcacuaugcgcgagugcagcuc

SEQ ID NO: 15284 - RNA, 36 nt, Artificial Sequence
  Description of Artificial Sequence:  Enzymatic Nucleic Acid
ugaugugauggcaugcacuaugcgcgauugggugau

SEQ ID NO: 15285 - RNA, 36 nt, Artificial Sequence
  Description of Artificial Sequence:  Enzymatic Nucleic Acid
ggcugugauggcaugcacuaugcgcgagggcuggcc

SEQ ID NO: 15286 - RNA, 36 nt, Artificial Sequence
  Description of Artificial Sequence:  Enzymatic Nucleic Acid
uugcuugauggcaugcacuaugcgcgaggccagcca

SEQ ID NO: 15287 - RNA, 36 nt, Artificial Sequence
  Description of Artificial Sequence:  Enzymatic Nucleic Acid
ccucaugauggcaugcacuaugcgcgaugucuuagg

SEQ ID NO: 15288 - RNA, 36 nt, Artificial Sequence
  Description of Artificial Sequence:  Enzymatic Nucleic Acid
cuccuugauggcaugcacuaugcgcgacaugucuua

SEQ ID NO: 15289 - RNA, 36 nt, Artificial Sequence
  Description of Artificial Sequence:  Enzymatic Nucleic Acid
uuucuugauggcaugcacuaugcgcgaugccuucuc

SEQ ID NO: 15290 - RNA, 36 nt, Artificial Sequence
  Description of Artificial Sequence:  Enzymatic Nucleic Acid
cgucuugauggcaugcacuaugcgcgaaauucuuuc

SEQ ID NO: 15291 - RNA, 36 nt, Artificial Sequence
  Description of Artificial Sequence:  Enzymatic Nucleic Acid
uggugugauggcaugcacuaugcgcggucucaaauu

SEQ ID NO: 15292 - RNA, 36 nt, Artificial Sequence
  Description of Artificial Sequence:  Enzymatic Nucleic Acid
gcccaugauggcaugcacuaugcgcgauggugcguc

SEQ ID NO: 15293 - RNA, 36 nt, Artificial Sequence
  Description of Artificial Sequence:  Enzymatic Nucleic Acid
aauggugauggcaugcacuaugcgcgauugcugagc

SEQ ID NO: 15294 - RNA, 36 nt, Artificial Sequence
  Description of Artificial Sequence:  Enzymatic Nucleic Acid
aggguugauggcaugcacuaugcgcgagagcuggga

SEQ ID NO: 15295 - RNA, 36 nt, Artificial Sequence
  Description of Artificial Sequence:  Enzymatic Nucleic Acid
gcccuugauggcaugcacuaugcgcgaaauguagaa

SEQ ID NO: 15296 - RNA, 36 nt, Artificial Sequence
  Description of Artificial Sequence:  Enzymatic Nucleic Acid
cucauugauggcaugcacuaugcgcggcuguccauc

SEQ ID NO: 15297 - RNA, 36 nt, Artificial Sequence
  Description of Artificial Sequence:  Enzymatic Nucleic Acid
ccccuugauggcaugcacuaugcgcgaucgcugucc

SEQ ID NO: 15298 - RNA, 36 nt, Artificial Sequence
  Description of Artificial Sequence:  Enzymatic Nucleic Acid
auggaugauggcaugcacuaugcgcgauagaaccac

SEQ ID NO: 15299 - RNA, 36 nt, Artificial Sequence
  Description of Artificial Sequence:  Enzymatic Nucleic Acid
caaaaugauggcaugcacuaugcgcgaugccacgaa

SEQ ID NO: 15300 - RNA, 36 nt, Artificial Sequence
  Description of Artificial Sequence:  Enzymatic Nucleic Acid
caaauugauggcaugcacuaugcgcgaaaacaugcc

SEQ ID NO: 15301 - RNA, 36 nt, Artificial Sequence
  Description of Artificial Sequence:  Enzymatic Nucleic Acid
ugcuaugauggcaugcacuaugcgcgaaaucaaaac

SEQ ID NO: 15302 - RNA, 36 nt, Artificial Sequence
  Description of Artificial Sequence:  Enzymatic Nucleic Acid
acccuugauggcaugcacuaugcgcgagugcuacaa

SEQ ID NO: 15303 - RNA, 36 nt, Artificial Sequence
  Description of Artificial Sequence:  Enzymatic Nucleic Acid
gggcuugauggcaugcacuaugcgcgagaguugagu

SEQ ID NO: 15304 - RNA, 36 nt, Artificial Sequence
  Description of Artificial Sequence:  Enzymatic Nucleic Acid
cagugugauggcaugcacuaugcgcgaucuuacuag

SEQ ID NO: 15305 - RNA, 36 nt, Artificial Sequence
  Description of Artificial Sequence:  Enzymatic Nucleic Acid
guuuuugauggcaugcacuaugcgcgagugcaucuu

SEQ ID NO: 15306 - RNA, 36 nt, Artificial Sequence
  Description of Artificial Sequence:  Enzymatic Nucleic Acid
ggagaugauggcaugcacuaugcgcgaaccuaacuc

SEQ ID NO: 15307 - RNA, 36 nt, Artificial Sequence
  Description of Artificial Sequence:  Enzymatic Nucleic Acid
gccauugauggcaugcacuaugcgcgauggccugga

SEQ ID NO: 15308 - RNA, 36 nt, Artificial Sequence
  Description of Artificial Sequence:  Enzymatic Nucleic Acid
auuuuugauggcaugcacuaugcgcgaguguaaggc

SEQ ID NO: 15309 - RNA, 36 nt, Artificial Sequence
  Description of Artificial Sequence:  Enzymatic Nucleic Acid
ugugaugauggcaugcacuaugcgcgauuuucagug

SEQ ID NO: 15310 - RNA, 36 nt, Artificial Sequence
  Description of Artificial Sequence:  Enzymatic Nucleic Acid
caaaaugauggcaugcacuaugcgcgagaauaauac

SEQ ID NO: 15311 - RNA, 36 nt, Artificial Sequence
  Description of Artificial Sequence:  Enzymatic Nucleic Acid
cugugugauggcaugcacuaugcgcgaaaacagaau

SEQ ID NO: 15312 - RNA, 36 nt, Artificial Sequence
  Description of Artificial Sequence:  Enzymatic Nucleic Acid
uuucaugauggcaugcacuaugcgcgaacuaacugu

SEQ ID NO: 15313 - RNA, 36 nt, Artificial Sequence
  Description of Artificial Sequence:  Enzymatic Nucleic Acid
ucuuuugauggcaugcacuaugcgcgacaacuaacu

SEQ ID NO: 15314 - RNA, 36 nt, Artificial Sequence
  Description of Artificial Sequence:  Enzymatic Nucleic Acid
cuucuugauggcaugcacuaugcgcgagcuuucuuu

SEQ ID NO: 15315 - RNA, 36 nt, Artificial Sequence
  Description of Artificial Sequence:  Enzymatic Nucleic Acid
auuuuugauggcaugcacuaugcgcgauucuucuca

SEQ ID NO: 15316 - RNA, 36 nt, Artificial Sequence
  Description of Artificial Sequence:  Enzymatic Nucleic Acid
gacugugauggcaugcacuaugcgcgauuuucauuc

SEQ ID NO: 15317 - RNA, 36 nt, Artificial Sequence
  Description of Artificial Sequence:  Enzymatic Nucleic Acid
cuccuugauggcaugcacuaugcgcgaggacugcau

SEQ ID NO: 15318 - RNA, 36 nt, Artificial Sequence
  Description of Artificial Sequence:  Enzymatic Nucleic Acid
gcccuugauggcaugcacuaugcgcgguuuugauau

SEQ ID NO: 15319 - RNA, 36 nt, Artificial Sequence
  Description of Artificial Sequence:  Enzymatic Nucleic Acid
uccauugauggcaugcacuaugcgcgagcccucguu

SEQ ID NO: 15320 - RNA, 36 nt, Artificial Sequence
  Description of Artificial Sequence:  Enzymatic Nucleic Acid
ccuuuugauggcaugcacuaugcgcgagauuagugu

SEQ ID NO: 15321 - RNA, 36 nt, Artificial Sequence
  Description of Artificial Sequence:  Enzymatic Nucleic Acid
uuccaugauggcaugcacuaugcgcgauccuuucag

SEQ ID NO: 15322 - RNA, 36 nt, Artificial Sequence
  Description of Artificial Sequence:  Enzymatic Nucleic Acid
auaugugauggcaugcacuaugcgcggccagcuaau

SEQ ID NO: 15323 - RNA, 36 nt, Artificial Sequence
  Description of Artificial Sequence:  Enzymatic Nucleic Acid
uuacuugauggcaugcacuaugcgcgaaggagcuua

SEQ ID NO: 15324 - RNA, 36 nt, Artificial Sequence
  Description of Artificial Sequence:  Enzymatic Nucleic Acid
aauuaugauggcaugcacuaugcgcgauaccaccuu

SEQ ID NO: 15325 - RNA, 36 nt, Artificial Sequence
  Description of Artificial Sequence:  Enzymatic Nucleic Acid
ccuugugauggcaugcacuaugcgcgauaaauuaca

SEQ ID NO: 15326 - RNA, 36 nt, Artificial Sequence
  Description of Artificial Sequence:  Enzymatic Nucleic Acid
uggcuugauggcaugcacuaugcgcgauuaacuaau

SEQ ID NO: 15327 - RNA, 36 nt, Artificial Sequence
  Description of Artificial Sequence:  Enzymatic Nucleic Acid
caaagugauggcaugcacuaugcgcgaguugaaaau

SEQ ID NO: 15328 - RNA, 36 nt, Artificial Sequence
  Description of Artificial Sequence:  Enzymatic Nucleic Acid
aguuuugauggcaugcacuaugcgcgaaagcaguug

SEQ ID NO: 15329 - RNA, 36 nt, Artificial Sequence
  Description of Artificial Sequence:  Enzymatic Nucleic Acid
ccaggugauggcaugcacuaugcgcgaaguuucaaa

SEQ ID NO: 15330 - RNA, 36 nt, Artificial Sequence
  Description of Artificial Sequence:  Enzymatic Nucleic Acid
augcuugauggcaugcacuaugcgcgagaccccagg

SEQ ID NO: 15331 - RNA, 36 nt, Artificial Sequence
  Description of Artificial Sequence:  Enzymatic Nucleic Acid
cccauugauggcaugcacuaugcgcgaugcucagac

SEQ ID NO: 15332 - RNA, 36 nt, Artificial Sequence
  Description of Artificial Sequence:  Enzymatic Nucleic Acid
guaggugauggcaugcacuaugcgcggcccuuuccu

SEQ ID NO: 15333 - RNA, 36 nt, Artificial Sequence
  Description of Artificial Sequence:  Enzymatic Nucleic Acid
cuuagugauggcaugcacuaugcgcggauccaaggc

SEQ ID NO: 15334 - RNA, 36 nt, Artificial Sequence
  Description of Artificial Sequence:  Enzymatic Nucleic Acid
ucaaaugauggcaugcacuaugcgcgagagccagcu

SEQ ID NO: 15335 - RNA, 36 nt, Artificial Sequence
  Description of Artificial Sequence:  Enzymatic Nucleic Acid
agcauugauggcaugcacuaugcgcgaaacagagcc

SEQ ID NO: 15336 - RNA, 36 nt, Artificial Sequence
  Description of Artificial Sequence:  Enzymatic Nucleic Acid
aauagugauggcaugcacuaugcgcgaucaaacaga

SEQ ID NO: 15337 - RNA, 36 nt, Artificial Sequence
  Description of Artificial Sequence:  Enzymatic Nucleic Acid
acuugugauggcaugcacuaugcgcgauaaauagca

SEQ ID NO: 15338 - RNA, 36 nt, Artificial Sequence
  Description of Artificial Sequence:  Enzymatic Nucleic Acid
aaauaugauggcaugcacuaugcgcgauagacccua

SEQ ID NO: 15339 - RNA, 36 nt, Artificial Sequence
  Description of Artificial Sequence:  Enzymatic Nucleic Acid
aggcgugauggcaugcacuaugcgcgauccuaaaua

SEQ ID NO: 15340 - RNA, 36 nt, Artificial Sequence
  Description of Artificial Sequence:  Enzymatic Nucleic Acid
guaggugauggcaugcacuaugcgcggcauccuaaa

SEQ ID NO: 15341 - RNA, 36 nt, Artificial Sequence
  Description of Artificial Sequence:  Enzymatic Nucleic Acid
gcagaugauggcaugcacuaugcgcgauccuaaaua

SEQ ID NO: 15342 - RNA, 36 nt, Artificial Sequence
  Description of Artificial Sequence:  Enzymatic Nucleic Acid
aggugugauggcaugcacuaugcgcgagacauccua

SEQ ID NO: 15343 - RNA, 36 nt, Artificial Sequence
  Description of Artificial Sequence:  Enzymatic Nucleic Acid
ggcugugauggcaugcacuaugcgcgagaaggugca

SEQ ID NO: 15344 - RNA, 36 nt, Artificial Sequence
  Description of Artificial Sequence:  Enzymatic Nucleic Acid
agcagugauggcaugcacuaugcgcgaauccacugu

SEQ ID NO: 15345 - RNA, 36 nt, Artificial Sequence
  Description of Artificial Sequence:  Enzymatic Nucleic Acid
agaagugauggcaugcacuaugcgcgagcaauccac

SEQ ID NO: 15346 - RNA, 36 nt, Artificial Sequence
  Description of Artificial Sequence:  Enzymatic Nucleic Acid
ggaagugauggcaugcacuaugcgcgauacucuucu

SEQ ID NO: 15347 - RNA, 36 nt, Artificial Sequence
  Description of Artificial Sequence:  Enzymatic Nucleic Acid
aauuaugauggcaugcacuaugcgcgauggauaaaa

SEQ ID NO: 15348 - RNA, 36 nt, Artificial Sequence
  Description of Artificial Sequence:  Enzymatic Nucleic Acid
uucuaugauggcaugcacuaugcgcgaguuaaauua

SEQ ID NO: 15349 - RNA, 36 nt, Artificial Sequence
  Description of Artificial Sequence:  Enzymatic Nucleic Acid
gagcuugauggcaugcacuaugcgcgagguucuaca

SEQ ID NO: 15350 - RNA, 36 nt, Artificial Sequence
  Description of Artificial Sequence:  Enzymatic Nucleic Acid
uucuuugauggcaugcacuaugcgcggguuacuuag

SEQ ID NO: 15351 - RNA, 36 nt, Artificial Sequence
  Description of Artificial Sequence:  Enzymatic Nucleic Acid
gcauaugauggcaugcacuaugcgcgauucuucggu

SEQ ID NO: 15352 - RNA, 36 nt, Artificial Sequence
  Description of Artificial Sequence:  Enzymatic Nucleic Acid
agaggugauggcaugcacuaugcgcgauacauucuu

SEQ ID NO: 15353 - RNA, 36 nt, Artificial Sequence
  Description of Artificial Sequence:  Enzymatic Nucleic Acid
aagaaugauggcaugcacuaugcgcgagaggcauac

SEQ ID NO: 15354 - RNA, 36 nt, Artificial Sequence
  Description of Artificial Sequence:  Enzymatic Nucleic Acid
uggcaugauggcaugcacuaugcgcgauaagaacag

SEQ ID NO: 15355 - RNA, 36 nt, Artificial Sequence
  Description of Artificial Sequence:  Enzymatic Nucleic Acid
uguggugauggcaugcacuaugcgcgacauaagaac

SEQ ID NO: 15356 - RNA, 36 nt, Artificial Sequence
  Description of Artificial Sequence:  Enzymatic Nucleic Acid
uuaaaugauggcaugcacuaugcgcgaaggaugugg

SEQ ID NO: 15357 - RNA, 36 nt, Artificial Sequence
  Description of Artificial Sequence:  Enzymatic Nucleic Acid
ucauaugauggcaugcacuaugcgcgagagagccuu

SEQ ID NO: 15358 - RNA, 36 nt, Artificial Sequence
  Description of Artificial Sequence:  Enzymatic Nucleic Acid
cucuuugauggcaugcacuaugcgcgauacagagag

SEQ ID NO: 15359 - RNA, 36 nt, Artificial Sequence
  Description of Artificial Sequence:  Enzymatic Nucleic Acid
aggcuugauggcaugcacuaugcgcgacuagggaau

SEQ ID NO: 15360 - RNA, 36 nt, Artificial Sequence
  Description of Artificial Sequence:  Enzymatic Nucleic Acid
uuccaugauggcaugcacuaugcgcgaaaagccgcu

SEQ ID NO: 15361 - RNA, 36 nt, Artificial Sequence
  Description of Artificial Sequence:  Enzymatic Nucleic Acid
aacaaugauggcaugcacuaugcgcgaaagauuugu

SEQ ID NO: 15362 - RNA, 36 nt, Artificial Sequence
  Description of Artificial Sequence:  Enzymatic Nucleic Acid
aggaaugauggcaugcacuaugcgcgaacaaagauu

SEQ ID NO: 15363 - RNA, 36 nt, Artificial Sequence
  Description of Artificial Sequence:  Enzymatic Nucleic Acid
guuugugauggcaugcacuaugcgcgguauguguaa

SEQ ID NO: 15364 - RNA, 36 nt, Artificial Sequence
  Description of Artificial Sequence:  Enzymatic Nucleic Acid
ugucaugauggcaugcacuaugcgcgaggugguuug

SEQ ID NO: 15365 - RNA, 36 nt, Artificial Sequence
  Description of Artificial Sequence:  Enzymatic Nucleic Acid
gcuguugauggcaugcacuaugcgcgacaggugguu

SEQ ID NO: 15366 - RNA, 36 nt, Artificial Sequence
  Description of Artificial Sequence:  Enzymatic Nucleic Acid
guuauugauggcaugcacuaugcgcgacuauuugcu

SEQ ID NO: 15367 - RNA, 36 nt, Artificial Sequence
  Description of Artificial Sequence:  Enzymatic Nucleic Acid
augaaugauggcaugcacuaugcgcgagcuaagguu

SEQ ID NO: 15368 - RNA, 36 nt, Artificial Sequence
  Description of Artificial Sequence:  Enzymatic Nucleic Acid
caagaugauggcaugcacuaugcgcgaugaacagcu

SEQ ID NO: 15369 - RNA, 36 nt, Artificial Sequence
  Description of Artificial Sequence:  Enzymatic Nucleic Acid
gaaauugauggcaugcacuaugcgcgaagacaugaa

SEQ ID NO: 15370 - RNA, 36 nt, Artificial Sequence
  Description of Artificial Sequence:  Enzymatic Nucleic Acid
aguaaugauggcaugcacuaugcgcgaauucuaaug

SEQ ID NO: 15371 - RNA, 36 nt, Artificial Sequence
  Description of Artificial Sequence:  Enzymatic Nucleic Acid
ugcuaugauggcaugcacuaugcgcgaaaccugagu

SEQ ID NO: 15372 - RNA, 36 nt, Artificial Sequence
  Description of Artificial Sequence:  Enzymatic Nucleic Acid
ggacuugauggcaugcacuaugcgcgauguaugcua

SEQ ID NO: 15373 - RNA, 36 nt, Artificial Sequence
  Description of Artificial Sequence:  Enzymatic Nucleic Acid
uucuaugauggcaugcacuaugcgcgauuaagacuc

SEQ ID NO: 15374 - RNA, 36 nt, Artificial Sequence
  Description of Artificial Sequence:  Enzymatic Nucleic Acid
uauuaugauggcaugcacuaugcgcgaagucuccau

SEQ ID NO: 15375 - RNA, 36 nt, Artificial Sequence
  Description of Artificial Sequence:  Enzymatic Nucleic Acid
uagcuugauggcaugcacuaugcgcgauuauuacaa

SEQ ID NO: 15376 - RNA, 36 nt, Artificial Sequence
  Description of Artificial Sequence:  Enzymatic Nucleic Acid
acaagugauggcaugcacuaugcgcgacuuuguaac

SEQ ID NO: 15377 - RNA, 36 nt, Artificial Sequence
  Description of Artificial Sequence:  Enzymatic Nucleic Acid
augaaugauggcaugcacuaugcgcgaagcacuuug

SEQ ID NO: 15378 - RNA, 36 nt, Artificial Sequence
  Description of Artificial Sequence:  Enzymatic Nucleic Acid
auuuuugauggcaugcacuaugcgcgagugcuauuu

SEQ ID NO: 15379 - RNA, 36 nt, Artificial Sequence
  Description of Artificial Sequence:  Enzymatic Nucleic Acid
uguuuugauggcaugcacuaugcgcgaauuuucagu

SEQ ID NO: 15380 - RNA, 36 nt, Artificial Sequence
  Description of Artificial Sequence:  Enzymatic Nucleic Acid
uaauuugauggcaugcacuaugcgcgauguuucaau

SEQ ID NO: 15381 - RNA, 36 nt, Artificial Sequence
  Description of Artificial Sequence:  Enzymatic Nucleic Acid
auuauugauggcaugcacuaugcgcgaguuaauuca

SEQ ID NO: 15382 - RNA, 36 nt, Artificial Sequence
  Description of Artificial Sequence:  Enzymatic Nucleic Acid
aauggugauggcaugcacuaugcgcgaaaugauugg

SEQ ID NO: 15383 - RNA, 36 nt, Artificial Sequence
  Description of Artificial Sequence:  Enzymatic Nucleic Acid
uuuguugauggcaugcacuaugcgcgauaaauggca

SEQ ID NO: 15384 - RNA, 36 nt, Artificial Sequence
  Description of Artificial Sequence:  Enzymatic Nucleic Acid
gugcuugauggcaugcacuaugcgcgguucuuuguu

SEQ ID NO: 15385 - RNA, 36 nt, Artificial Sequence
  Description of Artificial Sequence:  Enzymatic Nucleic Acid
uaucuugauggcaugcacuaugcgcgagaaacucug

SEQ ID NO: 15386 - RNA, 36 nt, Artificial Sequence
  Description of Artificial Sequence:  Enzymatic Nucleic Acid
acguaugauggcaugcacuaugcgcgauuaucucag

SEQ ID NO: 15387 - RNA, 36 nt, Artificial Sequence
  Description of Artificial Sequence:  Enzymatic Nucleic Acid
gguuuugauggcaugcacuaugcgcgagccccauuc

SEQ ID NO: 15388 - RNA, 36 nt, Artificial Sequence
  Description of Artificial Sequence:  Enzymatic Nucleic Acid
uugcaugauggcaugcacuaugcgcgaugguuucag

SEQ ID NO: 15389 - RNA, 36 nt, Artificial Sequence
  Description of Artificial Sequence:  Enzymatic Nucleic Acid
acuugugauggcaugcacuaugcgcgacaugguuuc

SEQ ID NO: 15390 - RNA, 36 nt, Artificial Sequence
  Description of Artificial Sequence:  Enzymatic Nucleic Acid
agacaugauggcaugcacuaugcgcgagacuugcac

SEQ ID NO: 15391 - RNA, 36 nt, Artificial Sequence
  Description of Artificial Sequence:  Enzymatic Nucleic Acid
caagaugauggcaugcacuaugcgcgacagacuugc

SEQ ID NO: 15392 - RNA, 36 nt, Artificial Sequence
  Description of Artificial Sequence:  Enzymatic Nucleic Acid
acugaugauggcaugcacuaugcgcgaagacacaga

SEQ ID NO: 15393 - RNA, 36 nt, Artificial Sequence
  Description of Artificial Sequence:  Enzymatic Nucleic Acid
gguguugauggcaugcacuaugcgcgacuucuugga

SEQ ID NO: 15394 - RNA, 36 nt, Artificial Sequence
  Description of Artificial Sequence:  Enzymatic Nucleic Acid
caucuugauggcaugcacuaugcgcgggugucacuu

SEQ ID NO: 15395 - RNA, 36 nt, Artificial Sequence
  Description of Artificial Sequence:  Enzymatic Nucleic Acid
auuaaugauggcaugcacuaugcgcgaucucggugu

SEQ ID NO: 15396 - RNA, 36 nt, Artificial Sequence
  Description of Artificial Sequence:  Enzymatic Nucleic Acid
caaggugauggcaugcacuaugcgcgacgggucccu

SEQ ID NO: 15397 - RNA, 36 nt, Artificial Sequence
  Description of Artificial Sequence:  Enzymatic Nucleic Acid
ggaaaugauggcaugcacuaugcgcgaaggcacggg

SEQ ID NO: 15398 - RNA, 36 nt, Artificial Sequence
  Description of Artificial Sequence:  Enzymatic Nucleic Acid
guuugugauggcaugcacuaugcgcgauucuugugg

SEQ ID NO: 15399 - RNA, 36 nt, Artificial Sequence
  Description of Artificial Sequence:  Enzymatic Nucleic Acid
gcuagugauggcaugcacuaugcgcggaguaucugu

SEQ ID NO: 15400 - RNA, 36 nt, Artificial Sequence
  Description of Artificial Sequence:  Enzymatic Nucleic Acid
uuaauugauggcaugcacuaugcgcgaauuuaaaug

SEQ ID NO: 15401 - RNA, 36 nt, Artificial Sequence
  Description of Artificial Sequence:  Enzymatic Nucleic Acid
agaugugauggcaugcacuaugcgcgacuccuccuu

SEQ ID NO: 15402 - RNA, 36 nt, Artificial Sequence
  Description of Artificial Sequence:  Enzymatic Nucleic Acid
acuguugauggcaugcacuaugcgcgggccaaagau

SEQ ID NO: 15403 - RNA, 36 nt, Artificial Sequence
  Description of Artificial Sequence:  Enzymatic Nucleic Acid
aguuaugauggcaugcacuaugcgcgaccacugucg

SEQ ID NO: 15404 - RNA, 36 nt, Artificial Sequence
  Description of Artificial Sequence:  Enzymatic Nucleic Acid
acacaugauggcaugcacuaugcgcgaguuacacca

SEQ ID NO: 15405 - RNA, 36 nt, Artificial Sequence
  Description of Artificial Sequence:  Enzymatic Nucleic Acid
acacaugauggcaugcacuaugcgcgacaguuacac

SEQ ID NO: 15406 - RNA, 36 nt, Artificial Sequence
  Description of Artificial Sequence:  Enzymatic Nucleic Acid
acacaugauggcaugcacuaugcgcgacacaguuac

SEQ ID NO: 15407 - RNA, 36 nt, Artificial Sequence
  Description of Artificial Sequence:  Enzymatic Nucleic Acid
acacaugauggcaugcacuaugcgcgacacacaguu

SEQ ID NO: 15408 - RNA, 36 nt, Artificial Sequence
  Description of Artificial Sequence:  Enzymatic Nucleic Acid
acacaugauggcaugcacuaugcgcgacacacacag

SEQ ID NO: 15409 - RNA, 36 nt, Artificial Sequence
  Description of Artificial Sequence:  Enzymatic Nucleic Acid
acacaugauggcaugcacuaugcgcgacacacacac

SEQ ID NO: 15410 - RNA, 36 nt, Artificial Sequence
  Description of Artificial Sequence:  Enzymatic Nucleic Acid
ccacaugauggcaugcacuaugcgcgacacacacac

SEQ ID NO: 15411 - RNA, 36 nt, Artificial Sequence
  Description of Artificial Sequence:  Enzymatic Nucleic Acid
acccaugauggcaugcacuaugcgcgacacacacac

SEQ ID NO: 15412 - RNA, 36 nt, Artificial Sequence
  Description of Artificial Sequence:  Enzymatic Nucleic Acid
acccaugauggcaugcacuaugcgcgacccacacac

SEQ ID NO: 15413 - RNA, 36 nt, Artificial Sequence
  Description of Artificial Sequence:  Enzymatic Nucleic Acid
acauaugauggcaugcacuaugcgcgacccacaccc

SEQ ID NO: 15414 - RNA, 36 nt, Artificial Sequence
  Description of Artificial Sequence:  Enzymatic Nucleic Acid
acacaugauggcaugcacuaugcgcgauacacccac

SEQ ID NO: 15415 - RNA, 36 nt, Artificial Sequence
  Description of Artificial Sequence:  Enzymatic Nucleic Acid
aaacaugauggcaugcacuaugcgcgacauacaccc

SEQ ID NO: 15416 - RNA, 36 nt, Artificial Sequence
  Description of Artificial Sequence:  Enzymatic Nucleic Acid
caaaaugauggcaugcacuaugcgcgacacauacac

SEQ ID NO: 15417 - RNA, 36 nt, Artificial Sequence
  Description of Artificial Sequence:  Enzymatic Nucleic Acid
augcaugauggcaugcacuaugcgcgaaaacacaca

SEQ ID NO: 15418 - RNA, 36 nt, Artificial Sequence
  Description of Artificial Sequence:  Enzymatic Nucleic Acid
uuaugugauggcaugcacuaugcgcgacaaaacaca

SEQ ID NO: 15419 - RNA, 36 nt, Artificial Sequence
  Description of Artificial Sequence:  Enzymatic Nucleic Acid
uguagugauggcaugcacuaugcgcgauauauucuu

SEQ ID NO: 15420 - RNA, 36 nt, Artificial Sequence
  Description of Artificial Sequence:  Enzymatic Nucleic Acid
uucauugauggcaugcacuaugcgcgaugacuagaa

SEQ ID NO: 15421 - RNA, 36 nt, Artificial Sequence
  Description of Artificial Sequence:  Enzymatic Nucleic Acid
acauuugauggcaugcacuaugcgcgaucaugacua

SEQ ID NO: 15422 - RNA, 36 nt, Artificial Sequence
  Description of Artificial Sequence:  Enzymatic Nucleic Acid
aaauaugauggcaugcacuaugcgcgauucaucaug

SEQ ID NO: 15423 - RNA, 36 nt, Artificial Sequence
  Description of Artificial Sequence:  Enzymatic Nucleic Acid
guauaugauggcaugcacuaugcgcgaaaauacauu

SEQ ID NO: 15424 - RNA, 36 nt, Artificial Sequence
  Description of Artificial Sequence:  Enzymatic Nucleic Acid
gauuaugauggcaugcacuaugcgcgaaaucccaau

SEQ ID NO: 15425 - RNA, 36 nt, Artificial Sequence
  Description of Artificial Sequence:  Enzymatic Nucleic Acid
uuuauugauggcaugcacuaugcgcgaauuaaguug

SEQ ID NO: 15426 - RNA, 36 nt, Artificial Sequence
  Description of Artificial Sequence:  Enzymatic Nucleic Acid
aaaagugauggcaugcacuaugcgcgaguugccaag

SEQ ID NO: 15427 - RNA, 36 nt, Artificial Sequence
  Description of Artificial Sequence:  Enzymatic Nucleic Acid
cagaaugauggcaugcacuaugcgcgauaaaagcag

SEQ ID NO: 15428 - RNA, 36 nt, Artificial Sequence
  Description of Artificial Sequence:  Enzymatic Nucleic Acid
ggagaugauggcaugcacuaugcgcgagaacauaaa

SEQ ID NO: 15429 - RNA, 36 nt, Artificial Sequence
  Description of Artificial Sequence:  Enzymatic Nucleic Acid
cuaaaugauggcaugcacuaugcgcgaaggauaaau

SEQ ID NO: 15430 - RNA, 36 nt, Artificial Sequence
  Description of Artificial Sequence:  Enzymatic Nucleic Acid
cauuuugauggcaugcacuaugcgcgaaaguuuuuc

SEQ ID NO: 15431 - RNA, 36 nt, Artificial Sequence
  Description of Artificial Sequence:  Enzymatic Nucleic Acid
uuuagugauggcaugcacuaugcgcgaauuuuuuga

SEQ ID NO: 15432 - RNA, 36 nt, Artificial Sequence
  Description of Artificial Sequence:  Enzymatic Nucleic Acid
acuaaugauggcaugcacuaugcgcgauuuaguuuu

SEQ ID NO: 15433 - RNA, 36 nt, Artificial Sequence
  Description of Artificial Sequence:  Enzymatic Nucleic Acid
acaauugauggcaugcacuaugcgcgagcuaaacua

SEQ ID NO: 15434 - RNA, 36 nt, Artificial Sequence
  Description of Artificial Sequence:  Enzymatic Nucleic Acid
ccauaugauggcaugcacuaugcgcgaaucagcuaa

SEQ ID NO: 15435 - RNA, 36 nt, Artificial Sequence
  Description of Artificial Sequence:  Enzymatic Nucleic Acid
agguuugauggcaugcacuaugcgcggaaaacccca

SEQ ID NO: 15436 - RNA, 36 nt, Artificial Sequence
  Description of Artificial Sequence:  Enzymatic Nucleic Acid
acaaaugauggcaugcacuaugcgcgaaaaagugaa

SEQ ID NO: 15437 - RNA, 36 nt, Artificial Sequence
  Description of Artificial Sequence:  Enzymatic Nucleic Acid
uaaaaugauggcaugcacuaugcgcgaaacaaaaag

SEQ ID NO: 15438 - RNA, 36 nt, Artificial Sequence
  Description of Artificial Sequence:  Enzymatic Nucleic Acid
uuacaugauggcaugcacuaugcgcgaguugugaaa

SEQ ID NO: 15439 - RNA, 36 nt, Artificial Sequence
  Description of Artificial Sequence:  Enzymatic Nucleic Acid
auuuaugauggcaugcacuaugcgcgacaguuguga

SEQ ID NO: 15440 - RNA, 36 nt, Artificial Sequence
  Description of Artificial Sequence:  Enzymatic Nucleic Acid
auuggugauggcaugcacuaugcgcgaauuuacaca

SEQ ID NO: 15441 - RNA, 36 nt, Artificial Sequence
  Description of Artificial Sequence:  Enzymatic Nucleic Acid
auggaugauggcaugcacuaugcgcgaggaauuauu

SEQ ID NO: 15442 - RNA, 36 nt, Artificial Sequence
  Description of Artificial Sequence:  Enzymatic Nucleic Acid
auuuuugauggcaugcacuaugcgcgauggacagga

SEQ ID NO: 15443 - RNA, 36 nt, Artificial Sequence
  Description of Artificial Sequence:  Enzymatic Nucleic Acid
auuugugauggcaugcacuaugcgcgauuuucaugg

SEQ ID NO: 15444 - RNA, 36 nt, Artificial Sequence
  Description of Artificial Sequence:  Enzymatic Nucleic Acid
aucuaugauggcaugcacuaugcgcgacuggauaau

SEQ ID NO: 15445 - RNA, 36 nt, Artificial Sequence
  Description of Artificial Sequence:  Enzymatic Nucleic Acid
augguugauggcaugcacuaugcgcgaaauauaucu

SEQ ID NO: 15446 - RNA, 36 nt, Artificial Sequence
  Description of Artificial Sequence:  Enzymatic Nucleic Acid
aaaggugauggcaugcacuaugcgcgaaaacuagcc

SEQ ID NO: 15447 - RNA, 36 nt, Artificial Sequence
  Description of Artificial Sequence:  Enzymatic Nucleic Acid
acauuugauggcaugcacuaugcgcgaggcugaaau

SEQ ID NO: 15448 - RNA, 36 nt, Artificial Sequence
  Description of Artificial Sequence:  Enzymatic Nucleic Acid
gcagaugauggcaugcacuaugcgcgauucaggcug

SEQ ID NO: 15449 - RNA, 36 nt, Artificial Sequence
  Description of Artificial Sequence:  Enzymatic Nucleic Acid
auaggugauggcaugcacuaugcgcgagacauucag

SEQ ID NO: 15450 - RNA, 36 nt, Artificial Sequence
  Description of Artificial Sequence:  Enzymatic Nucleic Acid
aagagugauggcaugcacuaugcgcgagagaauaua

SEQ ID NO: 15451 - RNA, 36 nt, Artificial Sequence
  Description of Artificial Sequence:  Enzymatic Nucleic Acid
gaauaugauggcaugcacuaugcgcgaaagagcaga

SEQ ID NO: 15452 - RNA, 36 nt, Artificial Sequence
  Description of Artificial Sequence:  Enzymatic Nucleic Acid
ggguuugauggcaugcacuaugcgcgaaaggagaau

SEQ ID NO: 15453 - RNA, 36 nt, Artificial Sequence
  Description of Artificial Sequence:  Enzymatic Nucleic Acid
ugccaugauggcaugcacuaugcgcgaggauguuuu

SEQ ID NO: 15454 - RNA, 38 nt, Artificial Sequence
  Description of Artificial Sequence:  Enzymatic Nucleic Acid
  misc_feature (31)..(31): n stands for inosine
cggccagccugaugaggccguuaggccgaancaccuug

SEQ ID NO: 15455 - RNA, 38 nt, Artificial Sequence
  Description of Artificial Sequence:  Enzymatic Nucleic Acid
  misc_feature (31)..(31): n stands for inosine
cgacggcccugaugaggccguuaggccgaancagcacc

SEQ ID NO: 15456 - RNA, 38 nt, Artificial Sequence
  Description of Artificial Sequence:  Enzymatic Nucleic Acid
  misc_feature (31)..(31): n stands for inosine
agggcgaccugaugaggccguuaggccgaanccagcag

SEQ ID NO: 15457 - RNA, 38 nt, Artificial Sequence
  Description of Artificial Sequence:  Enzymatic Nucleic Acid
  misc_feature (31)..(31): n stands for inosine
agccacagcugaugaggccguuaggccgaancgacggc

SEQ ID NO: 15458 - RNA, 38 nt, Artificial Sequence
  Description of Artificial Sequence:  Enzymatic Nucleic Acid
  misc_feature (31)..(31): n stands for inosine
gagccacacugaugaggccguuaggccgaangcgacgg

SEQ ID NO: 15459 - RNA, 38 nt, Artificial Sequence
  Description of Artificial Sequence:  Enzymatic Nucleic Acid
  misc_feature (31)..(31): n stands for inosine
agagccaccugaugaggccguuaggccgaanggcgacg

SEQ ID NO: 15460 - RNA, 38 nt, Artificial Sequence
  Description of Artificial Sequence:  Enzymatic Nucleic Acid
  misc_feature (31)..(31): n stands for inosine
ccacgcagcugaugaggccguuaggccgaanccacagg

SEQ ID NO: 15461 - RNA, 38 nt, Artificial Sequence
  Description of Artificial Sequence:  Enzymatic Nucleic Acid
  misc_feature (31)..(31): n stands for inosine
cuccacgccugaugaggccguuaggccgaanagccaca

SEQ ID NO: 15462 - RNA, 38 nt, Artificial Sequence
  Description of Artificial Sequence:  Enzymatic Nucleic Acid
  misc_feature (31)..(31): n stands for inosine
gcggcccgcugaugaggccguuaggccgaanucuccac

SEQ ID NO: 15463 - RNA, 38 nt, Artificial Sequence
  Description of Artificial Sequence:  Enzymatic Nucleic Acid
  misc_feature (31)..(31): n stands for inosine
ggcggccccugaugaggccguuaggccgaangucucca

SEQ ID NO: 15464 - RNA, 38 nt, Artificial Sequence
  Description of Artificial Sequence:  Enzymatic Nucleic Acid
  misc_feature (31)..(31): n stands for inosine
acagaggccugaugaggccguuaggccgaancccgggu

SEQ ID NO: 15465 - RNA, 38 nt, Artificial Sequence
  Description of Artificial Sequence:  Enzymatic Nucleic Acid
  misc_feature (31)..(31): n stands for inosine
cccacagacugaugaggccguuaggccgaancggcccg

SEQ ID NO: 15466 - RNA, 38 nt, Artificial Sequence
  Description of Artificial Sequence:  Enzymatic Nucleic Acid
  misc_feature (31)..(31): n stands for inosine
acccacagcugaugaggccguuaggccgaangcggccc

SEQ ID NO: 15467 - RNA, 38 nt, Artificial Sequence
  Description of Artificial Sequence:  Enzymatic Nucleic Acid
  misc_feature (31)..(31): n stands for inosine
aaacccaccugaugaggccguuaggccgaanaggcggc

SEQ ID NO: 15468 - RNA, 38 nt, Artificial Sequence
  Description of Artificial Sequence:  Enzymatic Nucleic Acid
  misc_feature (31)..(31): n stands for inosine
aaacacuacugaugaggccguuaggccgaancaaaccc

SEQ ID NO: 15469 - RNA, 38 nt, Artificial Sequence
  Description of Artificial Sequence:  Enzymatic Nucleic Acid
  misc_feature (31)..(31): n stands for inosine
gaaacacucugaugaggccguuaggccgaangcaaacc

SEQ ID NO: 15470 - RNA, 38 nt, Artificial Sequence
  Description of Artificial Sequence:  Enzymatic Nucleic Acid
  misc_feature (31)..(31): n stands for inosine
agaucaagcugaugaggccguuaggccgaanaaacacu

SEQ ID NO: 15471 - RNA, 38 nt, Artificial Sequence
  Description of Artificial Sequence:  Enzymatic Nucleic Acid
  misc_feature (31)..(31): n stands for inosine
gcagaucacugaugaggccguuaggccgaanagaaaca

SEQ ID NO: 15472 - RNA, 38 nt, Artificial Sequence
  Description of Artificial Sequence:  Enzymatic Nucleic Acid
  misc_feature (31)..(31): n stands for inosine
gccugggccugaugaggccguuaggccgaanaucaaga

SEQ ID NO: 15473 - RNA, 38 nt, Artificial Sequence
  Description of Artificial Sequence:  Enzymatic Nucleic Acid
  misc_feature (31)..(31): n stands for inosine
ugagccugcugaugaggccguuaggccgaancagauca

SEQ ID NO: 15474 - RNA, 38 nt, Artificial Sequence
  Description of Artificial Sequence:  Enzymatic Nucleic Acid
  misc_feature (31)..(31): n stands for inosine
cugagccucugaugaggccguuaggccgaangcagauc

SEQ ID NO: 15475 - RNA, 38 nt, Artificial Sequence
  Description of Artificial Sequence:  Enzymatic Nucleic Acid
  misc_feature (31)..(31): n stands for inosine
gcugagcccugaugaggccguuaggccgaanggcagau

SEQ ID NO: 15476 - RNA, 38 nt, Artificial Sequence
  Description of Artificial Sequence:  Enzymatic Nucleic Acid
  misc_feature (31)..(31): n stands for inosine
guaugcugcugaugaggccguuaggccgaanccugggc

SEQ ID NO: 15477 - RNA, 38 nt, Artificial Sequence
  Description of Artificial Sequence:  Enzymatic Nucleic Acid
  misc_feature (31)..(31): n stands for inosine
uuguaugccugaugaggccguuaggccgaanagccugg

SEQ ID NO: 15478 - RNA, 38 nt, Artificial Sequence
  Description of Artificial Sequence:  Enzymatic Nucleic Acid
  misc_feature (31)..(31): n stands for inosine
uuuuuguacugaugaggccguuaggccgaancugagcc

SEQ ID NO: 15479 - RNA, 38 nt, Artificial Sequence
  Description of Artificial Sequence:  Enzymatic Nucleic Acid
  misc_feature (31)..(31): n stands for inosine
ugucuuuucugaugaggccguuaggccgaanuaugcug

SEQ ID NO: 15480 - RNA, 38 nt, Artificial Sequence
  Description of Artificial Sequence:  Enzymatic Nucleic Acid
  misc_feature (31)..(31): n stands for inosine
uguaaguacugaugaggccguuaggccgaanucuuuuu

SEQ ID NO: 15481 - RNA, 38 nt, Artificial Sequence
  Description of Artificial Sequence:  Enzymatic Nucleic Acid
  misc_feature (31)..(31): n stands for inosine
uaauuguacugaugaggccguuaggccgaanuaugucu

SEQ ID NO: 15482 - RNA, 38 nt, Artificial Sequence
  Description of Artificial Sequence:  Enzymatic Nucleic Acid
  misc_feature (31)..(31): n stands for inosine
gccuuaaucugaugaggccguuaggccgaanuaaguau

SEQ ID NO: 15483 - RNA, 38 nt, Artificial Sequence
  Description of Artificial Sequence:  Enzymatic Nucleic Acid
  misc_feature (31)..(31): n stands for inosine
guuguauucugaugaggccguuaggccgaanccuuaau

SEQ ID NO: 15484 - RNA, 38 nt, Artificial Sequence
  Description of Artificial Sequence:  Enzymatic Nucleic Acid
  misc_feature (31)..(31): n stands for inosine
ugaagagucugaugaggccguuaggccgaanuauuagc

SEQ ID NO: 15485 - RNA, 38 nt, Artificial Sequence
  Description of Artificial Sequence:  Enzymatic Nucleic Acid
  misc_feature (31)..(31): n stands for inosine
auuugaagcugaugaggccguuaggccgaanuuguauu

SEQ ID NO: 15486 - RNA, 38 nt, Artificial Sequence
  Description of Artificial Sequence:  Enzymatic Nucleic Acid
  misc_feature (31)..(31): n stands for inosine
uaauuugacugaugaggccguuaggccgaanaguugua

SEQ ID NO: 15487 - RNA, 38 nt, Artificial Sequence
  Description of Artificial Sequence:  Enzymatic Nucleic Acid
  misc_feature (31)..(31): n stands for inosine
aaguaauucugaugaggccguuaggccgaanaagaguu

SEQ ID NO: 15488 - RNA, 38 nt, Artificial Sequence
  Description of Artificial Sequence:  Enzymatic Nucleic Acid
  misc_feature (31)..(31): n stands for inosine
ccccugcacugaugaggccguuaggccgaanuaauuug

SEQ ID NO: 15489 - RNA, 38 nt, Artificial Sequence
  Description of Artificial Sequence:  Enzymatic Nucleic Acid
  misc_feature (31)..(31): n stands for inosine
cugucccccugaugaggccguuaggccgaancaaguaa

SEQ ID NO: 15490 - RNA, 38 nt, Artificial Sequence
  Description of Artificial Sequence:  Enzymatic Nucleic Acid
  misc_feature (31)..(31): n stands for inosine
agucccuccugaugaggccguuaggccgaanuccccug

SEQ ID NO: 15491 - RNA, 38 nt, Artificial Sequence
  Description of Artificial Sequence:  Enzymatic Nucleic Acid
  misc_feature (31)..(31): n stands for inosine
ccaguccacugaugaggccguuaggccgaanucccucu

SEQ ID NO: 15492 - RNA, 38 nt, Artificial Sequence
  Description of Artificial Sequence:  Enzymatic Nucleic Acid
  misc_feature (31)..(31): n stands for inosine
ccaaagcccugaugaggccguuaggccgaanuccaagu

SEQ ID NO: 15493 - RNA, 38 nt, Artificial Sequence
  Description of Artificial Sequence:  Enzymatic Nucleic Acid
  misc_feature (31)..(31): n stands for inosine
ugggccaacugaugaggccguuaggccgaanccagucc

SEQ ID NO: 15494 - RNA, 38 nt, Artificial Sequence
  Description of Artificial Sequence:  Enzymatic Nucleic Acid
  misc_feature (31)..(31): n stands for inosine
gauuauugcugaugaggccguuaggccgaanccaaagc

SEQ ID NO: 15495 - RNA, 38 nt, Artificial Sequence
  Description of Artificial Sequence:  Enzymatic Nucleic Acid
  misc_feature (31)..(31): n stands for inosine
ugauuauucugaugaggccguuaggccgaangccaaag

SEQ ID NO: 15496 - RNA, 38 nt, Artificial Sequence
  Description of Artificial Sequence:  Enzymatic Nucleic Acid
  misc_feature (31)..(31): n stands for inosine
cugauuaucugaugaggccguuaggccgaanggccaaa

SEQ ID NO: 15497 - RNA, 38 nt, Artificial Sequence
  Description of Artificial Sequence:  Enzymatic Nucleic Acid
  misc_feature (31)..(31): n stands for inosine
ugccacuccugaugaggccguuaggccgaanauuauug

SEQ ID NO: 15498 - RNA, 38 nt, Artificial Sequence
  Description of Artificial Sequence:  Enzymatic Nucleic Acid
  misc_feature (31)..(31): n stands for inosine
uugcucaccugaugaggccguuaggccgaanccacucu

SEQ ID NO: 15499 - RNA, 38 nt, Artificial Sequence
  Description of Artificial Sequence:  Enzymatic Nucleic Acid
  misc_feature (31)..(31): n stands for inosine
ccacccuucugaugaggccguuaggccgaancucacug

SEQ ID NO: 15500 - RNA, 38 nt, Artificial Sequence
  Description of Artificial Sequence:  Enzymatic Nucleic Acid
  misc_feature (31)..(31): n stands for inosine
cugcacuccugaugaggccguuaggccgaanucaccuc

SEQ ID NO: 15501 - RNA, 38 nt, Artificial Sequence
  Description of Artificial Sequence:  Enzymatic Nucleic Acid
  misc_feature (31)..(31): n stands for inosine
gccaucgccugaugaggccguuaggccgaancacucag

SEQ ID NO: 15502 - RNA, 38 nt, Artificial Sequence
  Description of Artificial Sequence:  Enzymatic Nucleic Acid
  misc_feature (31)..(31): n stands for inosine
acagaagacugaugaggccguuaggccgaanccaucgc

SEQ ID NO: 15503 - RNA, 38 nt, Artificial Sequence
  Description of Artificial Sequence:  Enzymatic Nucleic Acid
  misc_feature (31)..(31): n stands for inosine
uacagaagcugaugaggccguuaggccgaangccaucg

SEQ ID NO: 15504 - RNA, 38 nt, Artificial Sequence
  Description of Artificial Sequence:  Enzymatic Nucleic Acid
  misc_feature (31)..(31): n stands for inosine
cuuacagacugaugaggccguuaggccgaanaggccau

SEQ ID NO: 15505 - RNA, 38 nt, Artificial Sequence
  Description of Artificial Sequence:  Enzymatic Nucleic Acid
  misc_feature (31)..(31): n stands for inosine
ugucuuaccugaugaggccguuaggccgaanaagaggc

SEQ ID NO: 15506 - RNA, 38 nt, Artificial Sequence
  Description of Artificial Sequence:  Enzymatic Nucleic Acid
  misc_feature (31)..(31): n stands for inosine
auugugagcugaugaggccguuaggccgaanucuuaca

SEQ ID NO: 15507 - RNA, 38 nt, Artificial Sequence
  Description of Artificial Sequence:  Enzymatic Nucleic Acid
  misc_feature (31)..(31): n stands for inosine
gaauugugcugaugaggccguuaggccgaanugucuua

SEQ ID NO: 15508 - RNA, 38 nt, Artificial Sequence
  Description of Artificial Sequence:  Enzymatic Nucleic Acid
  misc_feature (31)..(31): n stands for inosine
uggaauugcugaugaggccguuaggccgaanagugucu

SEQ ID NO: 15509 - RNA, 38 nt, Artificial Sequence
  Description of Artificial Sequence:  Enzymatic Nucleic Acid
  misc_feature (31)..(31): n stands for inosine
uuuggaaucugaugaggccguuaggccgaanugagugu

SEQ ID NO: 15510 - RNA, 38 nt, Artificial Sequence
  Description of Artificial Sequence:  Enzymatic Nucleic Acid
  misc_feature (31)..(31): n stands for inosine
ucacuuuucugaugaggccguuaggccgaanaauugug

SEQ ID NO: 15511 - RNA, 38 nt, Artificial Sequence
  Description of Artificial Sequence:  Enzymatic Nucleic Acid
  misc_feature (31)..(31): n stands for inosine
aucacuuucugaugaggccguuaggccgaangaauugu

SEQ ID NO: 15512 - RNA, 38 nt, Artificial Sequence
  Description of Artificial Sequence:  Enzymatic Nucleic Acid
  misc_feature (31)..(31): n stands for inosine
ggcuccagcugaugaggccguuaggccgaanucauuuc

SEQ ID NO: 15513 - RNA, 38 nt, Artificial Sequence
  Description of Artificial Sequence:  Enzymatic Nucleic Acid
  misc_feature (31)..(31): n stands for inosine
uaggcucccugaugaggccguuaggccgaanugucauu

SEQ ID NO: 15514 - RNA, 38 nt, Artificial Sequence
  Description of Artificial Sequence:  Enzymatic Nucleic Acid
  misc_feature (31)..(31): n stands for inosine
cacuuguacugaugaggccguuaggccgaancuccagu

SEQ ID NO: 15515 - RNA, 38 nt, Artificial Sequence
  Description of Artificial Sequence:  Enzymatic Nucleic Acid
  misc_feature (31)..(31): n stands for inosine
gcacuugucugaugaggccguuaggccgaangcuccag

SEQ ID NO: 15516 - RNA, 38 nt, Artificial Sequence
  Description of Artificial Sequence:  Enzymatic Nucleic Acid
  misc_feature (31)..(31): n stands for inosine
gaagcacucugaugaggccguuaggccgaanuaggcuc

SEQ ID NO: 15517 - RNA, 38 nt, Artificial Sequence
  Description of Artificial Sequence:  Enzymatic Nucleic Acid
  misc_feature (31)..(31): n stands for inosine
ccgguagacugaugaggccguuaggccgaancacuugu

SEQ ID NO: 15518 - RNA, 38 nt, Artificial Sequence
  Description of Artificial Sequence:  Enzymatic Nucleic Acid
  misc_feature (31)..(31): n stands for inosine
uucccggucugaugaggccguuaggccgaanaagcacu

SEQ ID NO: 15519 - RNA, 38 nt, Artificial Sequence
  Description of Artificial Sequence:  Enzymatic Nucleic Acid
  misc_feature (31)..(31): n stands for inosine
aguuuccccugaugaggccguuaggccgaanuagaagc

SEQ ID NO: 15520 - RNA, 38 nt, Artificial Sequence
  Description of Artificial Sequence:  Enzymatic Nucleic Acid
  misc_feature (31)..(31): n stands for inosine
gccaaguccugaugaggccguuaggccgaanuuucccg

SEQ ID NO: 15521 - RNA, 38 nt, Artificial Sequence
  Description of Artificial Sequence:  Enzymatic Nucleic Acid
  misc_feature (31)..(31): n stands for inosine
cgaggccacugaugaggccguuaggccgaanucaguuu

SEQ ID NO: 15522 - RNA, 38 nt, Artificial Sequence
  Description of Artificial Sequence:  Enzymatic Nucleic Acid
  misc_feature (31)..(31): n stands for inosine
augaccgacugaugaggccguuaggccgaanccaaguc

SEQ ID NO: 15523 - RNA, 38 nt, Artificial Sequence
  Description of Artificial Sequence:  Enzymatic Nucleic Acid
  misc_feature (31)..(31): n stands for inosine
aaugaccgcugaugaggccguuaggccgaangccaagu

SEQ ID NO: 15524 - RNA, 38 nt, Artificial Sequence
  Description of Artificial Sequence:  Enzymatic Nucleic Acid
  misc_feature (31)..(31): n stands for inosine
gacauaaacugaugaggccguuaggccgaanaccgagg

SEQ ID NO: 15525 - RNA, 38 nt, Artificial Sequence
  Description of Artificial Sequence:  Enzymatic Nucleic Acid
  misc_feature (31)..(31): n stands for inosine
uugaacaucugaugaggccguuaggccgaanacauaaa

SEQ ID NO: 15526 - RNA, 38 nt, Artificial Sequence
  Description of Artificial Sequence:  Enzymatic Nucleic Acid
  misc_feature (31)..(31): n stands for inosine
uguaaucucugaugaggccguuaggccgaanaacauag

SEQ ID NO: 15527 - RNA, 38 nt, Artificial Sequence
  Description of Artificial Sequence:  Enzymatic Nucleic Acid
  misc_feature (31)..(31): n stands for inosine
uggagauccugaugaggccguuaggccgaanuaaucuu

SEQ ID NO: 15528 - RNA, 38 nt, Artificial Sequence
  Description of Artificial Sequence:  Enzymatic Nucleic Acid
  misc_feature (31)..(31): n stands for inosine
auaaauggcugaugaggccguuaggccgaanaucugua

SEQ ID NO: 15529 - RNA, 38 nt, Artificial Sequence
  Description of Artificial Sequence:  Enzymatic Nucleic Acid
  misc_feature (31)..(31): n stands for inosine
caauaaaucugaugaggccguuaggccgaanagaucug

SEQ ID NO: 15530 - RNA, 38 nt, Artificial Sequence
  Description of Artificial Sequence:  Enzymatic Nucleic Acid
  misc_feature (31)..(31): n stands for inosine
gcaauaaacugaugaggccguuaggccgaangagaucu

SEQ ID NO: 15531 - RNA, 38 nt, Artificial Sequence
  Description of Artificial Sequence:  Enzymatic Nucleic Acid
  misc_feature (31)..(31): n stands for inosine
cuaacagacugaugaggccguuaggccgaancaauaaa

SEQ ID NO: 15532 - RNA, 38 nt, Artificial Sequence
  Description of Artificial Sequence:  Enzymatic Nucleic Acid
  misc_feature (31)..(31): n stands for inosine
ucacuaaccugaugaggccguuaggccgaanaagcaau

SEQ ID NO: 15533 - RNA, 38 nt, Artificial Sequence
  Description of Artificial Sequence:  Enzymatic Nucleic Acid
  misc_feature (31)..(31): n stands for inosine
uccauguucugaugaggccguuaggccgaanucacuaa

SEQ ID NO: 15534 - RNA, 38 nt, Artificial Sequence
  Description of Artificial Sequence:  Enzymatic Nucleic Acid
  misc_feature (31)..(31): n stands for inosine
cuccaugucugaugaggccguuaggccgaangucacua

SEQ ID NO: 15535 - RNA, 38 nt, Artificial Sequence
  Description of Artificial Sequence:  Enzymatic Nucleic Acid
  misc_feature (31)..(31): n stands for inosine
cgacuccacugaugaggccguuaggccgaanuugguca

SEQ ID NO: 15536 - RNA, 38 nt, Artificial Sequence
  Description of Artificial Sequence:  Enzymatic Nucleic Acid
  misc_feature (31)..(31): n stands for inosine
cucaguaacugaugaggccguuaggccgaanuacacga

SEQ ID NO: 15537 - RNA, 38 nt, Artificial Sequence
  Description of Artificial Sequence:  Enzymatic Nucleic Acid
  misc_feature (31)..(31): n stands for inosine
uuguucuccugaugaggccguuaggccgaanuaaugua

SEQ ID NO: 15538 - RNA, 38 nt, Artificial Sequence
  Description of Artificial Sequence:  Enzymatic Nucleic Acid
  misc_feature (31)..(31): n stands for inosine
uuuguuuucugaugaggccguuaggccgaanuucucag

SEQ ID NO: 15539 - RNA, 38 nt, Artificial Sequence
  Description of Artificial Sequence:  Enzymatic Nucleic Acid
  misc_feature (31)..(31): n stands for inosine
cacaguuucugaugaggccguuaggccgaanuuuuugu

SEQ ID NO: 15540 - RNA, 38 nt, Artificial Sequence
  Description of Artificial Sequence:  Enzymatic Nucleic Acid
  misc_feature (31)..(31): n stands for inosine
aucaccaccugaugaggccguuaggccgaanuuuuguu

SEQ ID NO: 15541 - RNA, 38 nt, Artificial Sequence
  Description of Artificial Sequence:  Enzymatic Nucleic Acid
  misc_feature (31)..(31): n stands for inosine
cgagacaucugaugaggccguuaggccgaanaaucacc

SEQ ID NO: 15542 - RNA, 38 nt, Artificial Sequence
  Description of Artificial Sequence:  Enzymatic Nucleic Acid
  misc_feature (31)..(31): n stands for inosine
ccgagacacugaugaggccguuaggccgaangaaucac

SEQ ID NO: 15543 - RNA, 38 nt, Artificial Sequence
  Description of Artificial Sequence:  Enzymatic Nucleic Acid
  misc_feature (31)..(31): n stands for inosine
uggacccgcugaugaggccguuaggccgaanacaugga

SEQ ID NO: 15544 - RNA, 38 nt, Artificial Sequence
  Description of Artificial Sequence:  Enzymatic Nucleic Acid
  misc_feature (31)..(31): n stands for inosine
uuugaaaucugaugaggccguuaggccgaanacccgag

SEQ ID NO: 15545 - RNA, 38 nt, Artificial Sequence
  Description of Artificial Sequence:  Enzymatic Nucleic Acid
  misc_feature (31)..(31): n stands for inosine
auuugaaacugaugaggccguuaggccgaangacccga

SEQ ID NO: 15546 - RNA, 38 nt, Artificial Sequence
  Description of Artificial Sequence:  Enzymatic Nucleic Acid
  misc_feature (31)..(31): n stands for inosine
uugagauucugaugaggccguuaggccgaanaaaugga

SEQ ID NO: 15547 - RNA, 38 nt, Artificial Sequence
  Description of Artificial Sequence:  Enzymatic Nucleic Acid
  misc_feature (31)..(31): n stands for inosine
acacguugcugaugaggccguuaggccgaanauuugaa

SEQ ID NO: 15548 - RNA, 38 nt, Artificial Sequence
  Description of Artificial Sequence:  Enzymatic Nucleic Acid
  misc_feature (31)..(31): n stands for inosine
ugacacgucugaugaggccguuaggccgaanagauuug

SEQ ID NO: 15549 - RNA, 38 nt, Artificial Sequence
  Description of Artificial Sequence:  Enzymatic Nucleic Acid
  misc_feature (31)..(31): n stands for inosine
gcacaaagcugaugaggccguuaggccgaanacacguu

SEQ ID NO: 15550 - RNA, 38 nt, Artificial Sequence
  Description of Artificial Sequence:  Enzymatic Nucleic Acid
  misc_feature (31)..(31): n stands for inosine
uugcacaacugaugaggccguuaggccgaanugacacg

SEQ ID NO: 15551 - RNA, 38 nt, Artificial Sequence
  Description of Artificial Sequence:  Enzymatic Nucleic Acid
  misc_feature (31)..(31): n stands for inosine
ggguaucucugaugaggccguuaggccgaancacaaag

SEQ ID NO: 15552 - RNA, 38 nt, Artificial Sequence
  Description of Artificial Sequence:  Enzymatic Nucleic Acid
  misc_feature (31)..(31): n stands for inosine
cuuuucugcugaugaggccguuaggccgaanuaucuug

SEQ ID NO: 15553 - RNA, 38 nt, Artificial Sequence
  Description of Artificial Sequence:  Enzymatic Nucleic Acid
  misc_feature (31)..(31): n stands for inosine
ucuuuucucugaugaggccguuaggccgaanguaucuu

SEQ ID NO: 15554 - RNA, 38 nt, Artificial Sequence
  Description of Artificial Sequence:  Enzymatic Nucleic Acid
  misc_feature (31)..(31): n stands for inosine
cucuuuuccugaugaggccguuaggccgaangguaucu

SEQ ID NO: 15555 - RNA, 38 nt, Artificial Sequence
  Description of Artificial Sequence:  Enzymatic Nucleic Acid
  misc_feature (31)..(31): n stands for inosine
uaccaucacugaugaggccguuaggccgaanaacaaau

SEQ ID NO: 15556 - RNA, 38 nt, Artificial Sequence
  Description of Artificial Sequence:  Enzymatic Nucleic Acid
  misc_feature (31)..(31): n stands for inosine
uuaccauccugaugaggccguuaggccgaangaacaaa

SEQ ID NO: 15557 - RNA, 38 nt, Artificial Sequence
  Description of Artificial Sequence:  Enzymatic Nucleic Acid
  misc_feature (31)..(31): n stands for inosine
ggaaauuccugaugaggccguuaggccgaanuuaccau

SEQ ID NO: 15558 - RNA, 38 nt, Artificial Sequence
  Description of Artificial Sequence:  Enzymatic Nucleic Acid
  misc_feature (31)..(31): n stands for inosine
cugucccacugaugaggccguuaggccgaanaaauucu

SEQ ID NO: 15559 - RNA, 38 nt, Artificial Sequence
  Description of Artificial Sequence:  Enzymatic Nucleic Acid
  misc_feature (31)..(31): n stands for inosine
gcuguccccugaugaggccguuaggccgaangaaauuc

SEQ ID NO: 15560 - RNA, 38 nt, Artificial Sequence
  Description of Artificial Sequence:  Enzymatic Nucleic Acid
  misc_feature (31)..(31): n stands for inosine
cuucuugccugaugaggccguuaggccgaanucccagg

SEQ ID NO: 15561 - RNA, 38 nt, Artificial Sequence
  Description of Artificial Sequence:  Enzymatic Nucleic Acid
  misc_feature (31)..(31): n stands for inosine
gcccuucucugaugaggccguuaggccgaancuguccc

SEQ ID NO: 15562 - RNA, 38 nt, Artificial Sequence
  Description of Artificial Sequence:  Enzymatic Nucleic Acid
  misc_feature (31)..(31): n stands for inosine
aauaguaacugaugaggccguuaggccgaancccuucu

SEQ ID NO: 15563 - RNA, 38 nt, Artificial Sequence
  Description of Artificial Sequence:  Enzymatic Nucleic Acid
  misc_feature (31)..(31): n stands for inosine
cugggaaucugaugaggccguuaggccgaanuaaagcc

SEQ ID NO: 15564 - RNA, 38 nt, Artificial Sequence
  Description of Artificial Sequence:  Enzymatic Nucleic Acid
  misc_feature (31)..(31): n stands for inosine
uguagcugcugaugaggccguuaggccgaanaauagua

SEQ ID NO: 15565 - RNA, 38 nt, Artificial Sequence
  Description of Artificial Sequence:  Enzymatic Nucleic Acid
  misc_feature (31)..(31): n stands for inosine
auguagcucugaugaggccguuaggccgaangaauagu

SEQ ID NO: 15566 - RNA, 38 nt, Artificial Sequence
  Description of Artificial Sequence:  Enzymatic Nucleic Acid
  misc_feature (31)..(31): n stands for inosine
cauguagccugaugaggccguuaggccgaanggaauag

SEQ ID NO: 15567 - RNA, 38 nt, Artificial Sequence
  Description of Artificial Sequence:  Enzymatic Nucleic Acid
  misc_feature (31)..(31): n stands for inosine
gaucaugucugaugaggccguuaggccgaancugggaa

SEQ ID NO: 15568 - RNA, 38 nt, Artificial Sequence
  Description of Artificial Sequence:  Enzymatic Nucleic Acid
  misc_feature (31)..(31): n stands for inosine
gcugaucacugaugaggccguuaggccgaanuagcugg

SEQ ID NO: 15569 - RNA, 38 nt, Artificial Sequence
  Description of Artificial Sequence:  Enzymatic Nucleic Acid
  misc_feature (31)..(31): n stands for inosine
agcauagccugaugaggccguuaggccgaanaucaugu

SEQ ID NO: 15570 - RNA, 38 nt, Artificial Sequence
  Description of Artificial Sequence:  Enzymatic Nucleic Acid
  misc_feature (31)..(31): n stands for inosine
gccagcaucugaugaggccguuaggccgaancugauca

SEQ ID NO: 15571 - RNA, 38 nt, Artificial Sequence
  Description of Artificial Sequence:  Enzymatic Nucleic Acid
  misc_feature (31)..(31): n stands for inosine
accaugcccugaugaggccguuaggccgaancauagcu

SEQ ID NO: 15572 - RNA, 38 nt, Artificial Sequence
  Description of Artificial Sequence:  Enzymatic Nucleic Acid
  misc_feature (31)..(31): n stands for inosine
gaagaccacugaugaggccguuaggccgaanccagcau

SEQ ID NO: 15573 - RNA, 38 nt, Artificial Sequence
  Description of Artificial Sequence:  Enzymatic Nucleic Acid
  misc_feature (31)..(31): n stands for inosine
uucacagacugaugaggccguuaggccgaanaccaugc

SEQ ID NO: 15574 - RNA, 38 nt, Artificial Sequence
  Description of Artificial Sequence:  Enzymatic Nucleic Acid
  misc_feature (31)..(31): n stands for inosine
ugcuucaccugaugaggccguuaggccgaanaagacca

SEQ ID NO: 15575 - RNA, 38 nt, Artificial Sequence
  Description of Artificial Sequence:  Enzymatic Nucleic Acid
  misc_feature (31)..(31): n stands for inosine
uuaauuuucugaugaggccguuaggccgaancuucaca

SEQ ID NO: 15576 - RNA, 38 nt, Artificial Sequence
  Description of Artificial Sequence:  Enzymatic Nucleic Acid
  misc_feature (31)..(31): n stands for inosine
aauagacucugaugaggccguuaggccgaanuaacuuu

SEQ ID NO: 15577 - RNA, 38 nt, Artificial Sequence
  Description of Artificial Sequence:  Enzymatic Nucleic Acid
  misc_feature (31)..(31): n stands for inosine
uaauagaccugaugaggccguuaggccgaanguaacuu

SEQ ID NO: 15578 - RNA, 38 nt, Artificial Sequence
  Description of Artificial Sequence:  Enzymatic Nucleic Acid
  misc_feature (31)..(31): n stands for inosine
uacauaaucugaugaggccguuaggccgaanacuggua

SEQ ID NO: 15579 - RNA, 38 nt, Artificial Sequence
  Description of Artificial Sequence:  Enzymatic Nucleic Acid
  misc_feature (31)..(31): n stands for inosine
gacaacuacugaugaggccguuaggccgaanuacauaa

SEQ ID NO: 15580 - RNA, 38 nt, Artificial Sequence
  Description of Artificial Sequence:  Enzymatic Nucleic Acid
  misc_feature (31)..(31): n stands for inosine
acggacuccugaugaggccguuaggccgaanaaccaca

SEQ ID NO: 15581 - RNA, 38 nt, Artificial Sequence
  Description of Artificial Sequence:  Enzymatic Nucleic Acid
  misc_feature (31)..(31): n stands for inosine
caugagaccugaugaggccguuaggccgaanacucaga

SEQ ID NO: 15582 - RNA, 38 nt, Artificial Sequence
  Description of Artificial Sequence:  Enzymatic Nucleic Acid
  misc_feature (31)..(31): n stands for inosine
auuccaugcugaugaggccguuaggccgaanacggacu

SEQ ID NO: 15583 - RNA, 38 nt, Artificial Sequence
  Description of Artificial Sequence:  Enzymatic Nucleic Acid
  misc_feature (31)..(31): n stands for inosine
caauuccacugaugaggccguuaggccgaanagacgga

SEQ ID NO: 15584 - RNA, 38 nt, Artificial Sequence
  Description of Artificial Sequence:  Enzymatic Nucleic Acid
  misc_feature (31)..(31): n stands for inosine
caacagaucugaugaggccguuaggccgaanuucaauu

SEQ ID NO: 15585 - RNA, 38 nt, Artificial Sequence
  Description of Artificial Sequence:  Enzymatic Nucleic Acid
  misc_feature (31)..(31): n stands for inosine
ucuccaaccugaugaggccguuaggccgaanauaguuc

SEQ ID NO: 15586 - RNA, 38 nt, Artificial Sequence
  Description of Artificial Sequence:  Enzymatic Nucleic Acid
  misc_feature (31)..(31): n stands for inosine
uuaagacacugaugaggccguuaggccgaancuuuucu

SEQ ID NO: 15587 - RNA, 38 nt, Artificial Sequence
  Description of Artificial Sequence:  Enzymatic Nucleic Acid
  misc_feature (31)..(31): n stands for inosine
acaauuuacugaugaggccguuaggccgaanacaagcu

SEQ ID NO: 15588 - RNA, 38 nt, Artificial Sequence
  Description of Artificial Sequence:  Enzymatic Nucleic Acid
  misc_feature (31)..(31): n stands for inosine
guucuugccugaugaggccguuaggccgaanuacaauu

SEQ ID NO: 15589 - RNA, 38 nt, Artificial Sequence
  Description of Artificial Sequence:  Enzymatic Nucleic Acid
  misc_feature (31)..(31): n stands for inosine
ucaguucucugaugaggccguuaggccgaancuguaca

SEQ ID NO: 15590 - RNA, 38 nt, Artificial Sequence
  Description of Artificial Sequence:  Enzymatic Nucleic Acid
  misc_feature (31)..(31): n stands for inosine
uuuaguuccugaugaggccguuaggccgaanuucuugc

SEQ ID NO: 15591 - RNA, 38 nt, Artificial Sequence
  Description of Artificial Sequence:  Enzymatic Nucleic Acid
  misc_feature (31)..(31): n stands for inosine
ccacauuucugaugaggccguuaggccgaanuucaguu

SEQ ID NO: 15592 - RNA, 38 nt, Artificial Sequence
  Description of Artificial Sequence:  Enzymatic Nucleic Acid
  misc_feature (31)..(31): n stands for inosine
ccaguugacugaugaggccguuaggccgaanucaaucc

SEQ ID NO: 15593 - RNA, 38 nt, Artificial Sequence
  Description of Artificial Sequence:  Enzymatic Nucleic Acid
  misc_feature (31)..(31): n stands for inosine
uucccagucugaugaggccguuaggccgaanaagucaa

SEQ ID NO: 15594 - RNA, 38 nt, Artificial Sequence
  Description of Artificial Sequence:  Enzymatic Nucleic Acid
  misc_feature (31)..(31): n stands for inosine
guauuccccugaugaggccguuaggccgaanuugaagu

SEQ ID NO: 15595 - RNA, 38 nt, Artificial Sequence
  Description of Artificial Sequence:  Enzymatic Nucleic Acid
  misc_feature (31)..(31): n stands for inosine
cgaagaagcugaugaggccguuaggccgaanuauuccc

SEQ ID NO: 15596 - RNA, 38 nt, Artificial Sequence
  Description of Artificial Sequence:  Enzymatic Nucleic Acid
  misc_feature (31)..(31): n stands for inosine
ucgaagaacugaugaggccguuaggccgaanguauucc

SEQ ID NO: 15597 - RNA, 38 nt, Artificial Sequence
  Description of Artificial Sequence:  Enzymatic Nucleic Acid
  misc_feature (31)..(31): n stands for inosine
uucgaagacugaugaggccguuaggccgaangguauuc

SEQ ID NO: 15598 - RNA, 38 nt, Artificial Sequence
  Description of Artificial Sequence:  Enzymatic Nucleic Acid
  misc_feature (31)..(31): n stands for inosine
ugcuucgacugaugaggccguuaggccgaanaagggua

SEQ ID NO: 15599 - RNA, 38 nt, Artificial Sequence
  Description of Artificial Sequence:  Enzymatic Nucleic Acid
  misc_feature (31)..(31): n stands for inosine
uaugcugacugaugaggccguuaggccgaancuucgaa

SEQ ID NO: 15600 - RNA, 38 nt, Artificial Sequence
  Description of Artificial Sequence:  Enzymatic Nucleic Acid
  misc_feature (31)..(31): n stands for inosine
ucuuaugccugaugaggccguuaggccgaanaugcuuc

SEQ ID NO: 15601 - RNA, 38 nt, Artificial Sequence
  Description of Artificial Sequence:  Enzymatic Nucleic Acid
  misc_feature (31)..(31): n stands for inosine
guuucuuacugaugaggccguuaggccgaancugaugc

SEQ ID NO: 15602 - RNA, 38 nt, Artificial Sequence
  Description of Artificial Sequence:  Enzymatic Nucleic Acid
  misc_feature (31)..(31): n stands for inosine
gguuuacacugaugaggccguuaggccgaanuuucuua

SEQ ID NO: 15603 - RNA, 38 nt, Artificial Sequence
  Description of Artificial Sequence:  Enzymatic Nucleic Acid
  misc_feature (31)..(31): n stands for inosine
uaggucuccugaugaggccguuaggccgaanuuuacaa

SEQ ID NO: 15604 - RNA, 38 nt, Artificial Sequence
  Description of Artificial Sequence:  Enzymatic Nucleic Acid
  misc_feature (31)..(31): n stands for inosine
gguuuuuacugaugaggccguuaggccgaanucucggu

SEQ ID NO: 15605 - RNA, 38 nt, Artificial Sequence
  Description of Artificial Sequence:  Enzymatic Nucleic Acid
  misc_feature (31)..(31): n stands for inosine
ggguuuuucugaugaggccguuaggccgaangucucgg

SEQ ID NO: 15606 - RNA, 38 nt, Artificial Sequence
  Description of Artificial Sequence:  Enzymatic Nucleic Acid
  misc_feature (31)..(31): n stands for inosine
ccagacugcugaugaggccguuaggccgaanuuuuuag

SEQ ID NO: 15607 - RNA, 38 nt, Artificial Sequence
  Description of Artificial Sequence:  Enzymatic Nucleic Acid
  misc_feature (31)..(31): n stands for inosine
cccagacucugaugaggccguuaggccgaanguuuuua

SEQ ID NO: 15608 - RNA, 38 nt, Artificial Sequence
  Description of Artificial Sequence:  Enzymatic Nucleic Acid
  misc_feature (31)..(31): n stands for inosine
ucccagaccugaugaggccguuaggccgaangguuuuu

SEQ ID NO: 15609 - RNA, 38 nt, Artificial Sequence
  Description of Artificial Sequence:  Enzymatic Nucleic Acid
  misc_feature (31)..(31): n stands for inosine
ucacuccccugaugaggccguuaggccgaanacugggu

SEQ ID NO: 15610 - RNA, 38 nt, Artificial Sequence
  Description of Artificial Sequence:  Enzymatic Nucleic Acid
  misc_feature (31)..(31): n stands for inosine
aguuaaggcugaugaggccguuaggccgaancucaaaa

SEQ ID NO: 15611 - RNA, 38 nt, Artificial Sequence
  Description of Artificial Sequence:  Enzymatic Nucleic Acid
  misc_feature (31)..(31): n stands for inosine
auaguuaacugaugaggccguuaggccgaanugcucaa

SEQ ID NO: 15612 - RNA, 38 nt, Artificial Sequence
  Description of Artificial Sequence:  Enzymatic Nucleic Acid
  misc_feature (31)..(31): n stands for inosine
uauaguuacugaugaggccguuaggccgaangugcuca

SEQ ID NO: 15613 - RNA, 38 nt, Artificial Sequence
  Description of Artificial Sequence:  Enzymatic Nucleic Acid
  misc_feature (31)..(31): n stands for inosine
ccaucuaucugaugaggccguuaggccgaanuuaaggu

SEQ ID NO: 15614 - RNA, 38 nt, Artificial Sequence
  Description of Artificial Sequence:  Enzymatic Nucleic Acid
  misc_feature (31)..(31): n stands for inosine
ucacuccgcugaugaggccguuaggccgaanuuacacc

SEQ ID NO: 15615 - RNA, 38 nt, Artificial Sequence
  Description of Artificial Sequence:  Enzymatic Nucleic Acid
  misc_feature (31)..(31): n stands for inosine
gucacucccugaugaggccguuaggccgaanguuacac

SEQ ID NO: 15616 - RNA, 38 nt, Artificial Sequence
  Description of Artificial Sequence:  Enzymatic Nucleic Acid
  misc_feature (31)..(31): n stands for inosine
caauccuucugaugaggccguuaggccgaanucacucc

SEQ ID NO: 15617 - RNA, 38 nt, Artificial Sequence
  Description of Artificial Sequence:  Enzymatic Nucleic Acid
  misc_feature (31)..(31): n stands for inosine
acaauccucugaugaggccguuaggccgaangucacuc

SEQ ID NO: 15618 - RNA, 38 nt, Artificial Sequence
  Description of Artificial Sequence:  Enzymatic Nucleic Acid
  misc_feature (31)..(31): n stands for inosine
ugcacaggcugaugaggccguuaggccgaanuacaauc

SEQ ID NO: 15619 - RNA, 38 nt, Artificial Sequence
  Description of Artificial Sequence:  Enzymatic Nucleic Acid
  misc_feature (31)..(31): n stands for inosine
gcugcacacugaugaggccguuaggccgaanuguacaa

SEQ ID NO: 15620 - RNA, 38 nt, Artificial Sequence
  Description of Artificial Sequence:  Enzymatic Nucleic Acid
  misc_feature (31)..(31): n stands for inosine
ugcugcaccugaugaggccguuaggccgaanguguaca

SEQ ID NO: 15621 - RNA, 38 nt, Artificial Sequence
  Description of Artificial Sequence:  Enzymatic Nucleic Acid
  misc_feature (31)..(31): n stands for inosine
cuggaugccugaugaggccguuaggccgaancacaggu

SEQ ID NO: 15622 - RNA, 38 nt, Artificial Sequence
  Description of Artificial Sequence:  Enzymatic Nucleic Acid
  misc_feature (31)..(31): n stands for inosine
ccacuggacugaugaggccguuaggccgaancugcaca

SEQ ID NO: 15623 - RNA, 38 nt, Artificial Sequence
  Description of Artificial Sequence:  Enzymatic Nucleic Acid
  misc_feature (31)..(31): n stands for inosine
agcccacucugaugaggccguuaggccgaanaugcugc

SEQ ID NO: 15624 - RNA, 38 nt, Artificial Sequence
  Description of Artificial Sequence:  Enzymatic Nucleic Acid
  misc_feature (31)..(31): n stands for inosine
cagcccaccugaugaggccguuaggccgaangaugcug

SEQ ID NO: 15625 - RNA, 38 nt, Artificial Sequence
  Description of Artificial Sequence:  Enzymatic Nucleic Acid
  misc_feature (31)..(31): n stands for inosine
uggucauccugaugaggccguuaggccgaancccacug

SEQ ID NO: 15626 - RNA, 38 nt, Artificial Sequence
  Description of Artificial Sequence:  Enzymatic Nucleic Acid
  misc_feature (31)..(31): n stands for inosine
uucuucuucugaugaggccguuaggccgaanucaucag

SEQ ID NO: 15627 - RNA, 38 nt, Artificial Sequence
  Description of Artificial Sequence:  Enzymatic Nucleic Acid
  misc_feature (31)..(31): n stands for inosine
guucuucucugaugaggccguuaggccgaangucauca

SEQ ID NO: 15628 - RNA, 38 nt, Artificial Sequence
  Description of Artificial Sequence:  Enzymatic Nucleic Acid
  misc_feature (31)..(31): n stands for inosine
aaaugugccugaugaggccguuaggccgaanuucuucu

SEQ ID NO: 15629 - RNA, 38 nt, Artificial Sequence
  Description of Artificial Sequence:  Enzymatic Nucleic Acid
  misc_feature (31)..(31): n stands for inosine
gacaaaugcugaugaggccguuaggccgaancuguucu

SEQ ID NO: 15630 - RNA, 38 nt, Artificial Sequence
  Description of Artificial Sequence:  Enzymatic Nucleic Acid
  misc_feature (31)..(31): n stands for inosine
cugacaaacugaugaggccguuaggccgaanugcuguu

SEQ ID NO: 15631 - RNA, 38 nt, Artificial Sequence
  Description of Artificial Sequence:  Enzymatic Nucleic Acid
  misc_feature (31)..(31): n stands for inosine
auggaccccugaugaggccguuaggccgaanacaaaug

SEQ ID NO: 15632 - RNA, 38 nt, Artificial Sequence
  Description of Artificial Sequence:  Enzymatic Nucleic Acid
  misc_feature (31)..(31): n stands for inosine
uuuuucaucugaugaggccguuaggccgaanacccuga

SEQ ID NO: 15633 - RNA, 38 nt, Artificial Sequence
  Description of Artificial Sequence:  Enzymatic Nucleic Acid
  misc_feature (31)..(31): n stands for inosine
guuuuucacugaugaggccguuaggccgaangacccug

SEQ ID NO: 15634 - RNA, 38 nt, Artificial Sequence
  Description of Artificial Sequence:  Enzymatic Nucleic Acid
  misc_feature (31)..(31): n stands for inosine
caacaaaacugaugaggccguuaggccgaanuuuuuca

SEQ ID NO: 15635 - RNA, 38 nt, Artificial Sequence
  Description of Artificial Sequence:  Enzymatic Nucleic Acid
  misc_feature (31)..(31): n stands for inosine
gcaacaaacugaugaggccguuaggccgaanguuuuuc

SEQ ID NO: 15636 - RNA, 38 nt, Artificial Sequence
  Description of Artificial Sequence:  Enzymatic Nucleic Acid
  misc_feature (31)..(31): n stands for inosine
cuuccaaacugaugaggccguuaggccgaancaacaaa

SEQ ID NO: 15637 - RNA, 38 nt, Artificial Sequence
  Description of Artificial Sequence:  Enzymatic Nucleic Acid
  misc_feature (31)..(31): n stands for inosine
agauuccacugaugaggccguuaggccgaanccacuuc

SEQ ID NO: 15638 - RNA, 38 nt, Artificial Sequence
  Description of Artificial Sequence:  Enzymatic Nucleic Acid
  misc_feature (31)..(31): n stands for inosine
uccaccagcugaugaggccguuaggccgaanauuccau

SEQ ID NO: 15639 - RNA, 38 nt, Artificial Sequence
  Description of Artificial Sequence:  Enzymatic Nucleic Acid
  misc_feature (31)..(31): n stands for inosine
cuuccacccugaugaggccguuaggccgaanagauucc

SEQ ID NO: 15640 - RNA, 38 nt, Artificial Sequence
  Description of Artificial Sequence:  Enzymatic Nucleic Acid
  misc_feature (31)..(31): n stands for inosine
cccaccgucugaugaggccguuaggccgaancuuccac

SEQ ID NO: 15641 - RNA, 38 nt, Artificial Sequence
  Description of Artificial Sequence:  Enzymatic Nucleic Acid
  misc_feature (31)..(31): n stands for inosine
ccccaccgcugaugaggccguuaggccgaangcuucca

SEQ ID NO: 15642 - RNA, 38 nt, Artificial Sequence
  Description of Artificial Sequence:  Enzymatic Nucleic Acid
  misc_feature (31)..(31): n stands for inosine
agggauuccugaugaggccguuaggccgaanacacgcu

SEQ ID NO: 15643 - RNA, 38 nt, Artificial Sequence
  Description of Artificial Sequence:  Enzymatic Nucleic Acid
  misc_feature (31)..(31): n stands for inosine
cuucgcagcugaugaggccguuaggccgaanauucuga

SEQ ID NO: 15644 - RNA, 38 nt, Artificial Sequence
  Description of Artificial Sequence:  Enzymatic Nucleic Acid
  misc_feature (31)..(31): n stands for inosine
acuucgcacugaugaggccguuaggccgaangauucug

SEQ ID NO: 15645 - RNA, 38 nt, Artificial Sequence
  Description of Artificial Sequence:  Enzymatic Nucleic Acid
  misc_feature (31)..(31): n stands for inosine
uacuucgccugaugaggccguuaggccgaanggauucu

SEQ ID NO: 15646 - RNA, 38 nt, Artificial Sequence
  Description of Artificial Sequence:  Enzymatic Nucleic Acid
  misc_feature (31)..(31): n stands for inosine
guaaccaacugaugaggccguuaggccgaanuacuucg

SEQ ID NO: 15647 - RNA, 38 nt, Artificial Sequence
  Description of Artificial Sequence:  Enzymatic Nucleic Acid
  misc_feature (31)..(31): n stands for inosine
gguaaccacugaugaggccguuaggccgaanguacuuc

SEQ ID NO: 15648 - RNA, 38 nt, Artificial Sequence
  Description of Artificial Sequence:  Enzymatic Nucleic Acid
  misc_feature (31)..(31): n stands for inosine
ugggggugcugaugaggccguuaggccgaanuaaccaa

SEQ ID NO: 15649 - RNA, 38 nt, Artificial Sequence
  Description of Artificial Sequence:  Enzymatic Nucleic Acid
  misc_feature (31)..(31): n stands for inosine
cugggggucugaugaggccguuaggccgaanguaacca

SEQ ID NO: 15650 - RNA, 38 nt, Artificial Sequence
  Description of Artificial Sequence:  Enzymatic Nucleic Acid
  misc_feature (31)..(31): n stands for inosine
ucugggggcugaugaggccguuaggccgaangguaacc

SEQ ID NO: 15651 - RNA, 38 nt, Artificial Sequence
  Description of Artificial Sequence:  Enzymatic Nucleic Acid
  misc_feature (31)..(31): n stands for inosine
uuucugggcugaugaggccguuaggccgaanuggguaa

SEQ ID NO: 15652 - RNA, 38 nt, Artificial Sequence
  Description of Artificial Sequence:  Enzymatic Nucleic Acid
  misc_feature (31)..(31): n stands for inosine
auuucuggcugaugaggccguuaggccgaangugggua

SEQ ID NO: 15653 - RNA, 38 nt, Artificial Sequence
  Description of Artificial Sequence:  Enzymatic Nucleic Acid
  misc_feature (31)..(31): n stands for inosine
uauuucugcugaugaggccguuaggccgaanggugggu

SEQ ID NO: 15654 - RNA, 38 nt, Artificial Sequence
  Description of Artificial Sequence:  Enzymatic Nucleic Acid
  misc_feature (31)..(31): n stands for inosine
uuauuucucugaugaggccguuaggccgaanggguggg

SEQ ID NO: 15655 - RNA, 38 nt, Artificial Sequence
  Description of Artificial Sequence:  Enzymatic Nucleic Acid
  misc_feature (31)..(31): n stands for inosine
uuuauuuccugaugaggccguuaggccgaanggggugg

SEQ ID NO: 15656 - RNA, 38 nt, Artificial Sequence
  Description of Artificial Sequence:  Enzymatic Nucleic Acid
  misc_feature (31)..(31): n stands for inosine
acucaaggcugaugaggccguuaggccgaanuauucca

SEQ ID NO: 15657 - RNA, 38 nt, Artificial Sequence
  Description of Artificial Sequence:  Enzymatic Nucleic Acid
  misc_feature (31)..(31): n stands for inosine
gacucaagcugaugaggccguuaggccgaanguauucc

SEQ ID NO: 15658 - RNA, 38 nt, Artificial Sequence
  Description of Artificial Sequence:  Enzymatic Nucleic Acid
  misc_feature (31)..(31): n stands for inosine
ggacucaacugaugaggccguuaggccgaangguauuc

SEQ ID NO: 15659 - RNA, 38 nt, Artificial Sequence
  Description of Artificial Sequence:  Enzymatic Nucleic Acid
  misc_feature (31)..(31): n stands for inosine
uggacucacugaugaggccguuaggccgaanggguauu

SEQ ID NO: 15660 - RNA, 38 nt, Artificial Sequence
  Description of Artificial Sequence:  Enzymatic Nucleic Acid
  misc_feature (31)..(31): n stands for inosine
gugugauucugaugaggccguuaggccgaanacucaag

SEQ ID NO: 15661 - RNA, 38 nt, Artificial Sequence
  Description of Artificial Sequence:  Enzymatic Nucleic Acid
  misc_feature (31)..(31): n stands for inosine
ugugugaucugaugaggccguuaggccgaangacucaa

SEQ ID NO: 15662 - RNA, 38 nt, Artificial Sequence
  Description of Artificial Sequence:  Enzymatic Nucleic Acid
  misc_feature (31)..(31): n stands for inosine
uaauugugcugaugaggccguuaggccgaanauuggac

SEQ ID NO: 15663 - RNA, 38 nt, Artificial Sequence
  Description of Artificial Sequence:  Enzymatic Nucleic Acid
  misc_feature (31)..(31): n stands for inosine
uuuaauugcugaugaggccguuaggccgaanugauugg

SEQ ID NO: 15664 - RNA, 38 nt, Artificial Sequence
  Description of Artificial Sequence:  Enzymatic Nucleic Acid
  misc_feature (31)..(31): n stands for inosine
gcuuuaaucugaugaggccguuaggccgaanugugauu

SEQ ID NO: 15665 - RNA, 38 nt, Artificial Sequence
  Description of Artificial Sequence:  Enzymatic Nucleic Acid
  misc_feature (31)..(31): n stands for inosine
ucaguacacugaugaggccguuaggccgaanccccgcu

SEQ ID NO: 15666 - RNA, 38 nt, Artificial Sequence
  Description of Artificial Sequence:  Enzymatic Nucleic Acid
  misc_feature (31)..(31): n stands for inosine
uaaucguccugaugaggccguuaggccgaanuacaugc

SEQ ID NO: 15667 - RNA, 38 nt, Artificial Sequence
  Description of Artificial Sequence:  Enzymatic Nucleic Acid
  misc_feature (31)..(31): n stands for inosine
auuuccugcugaugaggccguuaggccgaanucucuuu

SEQ ID NO: 15668 - RNA, 38 nt, Artificial Sequence
  Description of Artificial Sequence:  Enzymatic Nucleic Acid
  misc_feature (31)..(31): n stands for inosine
uaauuucccugaugaggccguuaggccgaanugucucu

SEQ ID NO: 15669 - RNA, 38 nt, Artificial Sequence
  Description of Artificial Sequence:  Enzymatic Nucleic Acid
  misc_feature (31)..(31): n stands for inosine
gaugacagcugaugaggccguuaggccgaanuaauuuc

SEQ ID NO: 15670 - RNA, 38 nt, Artificial Sequence
  Description of Artificial Sequence:  Enzymatic Nucleic Acid
  misc_feature (31)..(31): n stands for inosine
aggaugaccugaugaggccguuaggccgaanuguaauu

SEQ ID NO: 15671 - RNA, 38 nt, Artificial Sequence
  Description of Artificial Sequence:  Enzymatic Nucleic Acid
  misc_feature (31)..(31): n stands for inosine
gguaaggacugaugaggccguuaggccgaanacagugu

SEQ ID NO: 15672 - RNA, 38 nt, Artificial Sequence
  Description of Artificial Sequence:  Enzymatic Nucleic Acid
  misc_feature (31)..(31): n stands for inosine
auugguaacugaugaggccguuaggccgaanaugacag

SEQ ID NO: 15673 - RNA, 38 nt, Artificial Sequence
  Description of Artificial Sequence:  Enzymatic Nucleic Acid
  misc_feature (31)..(31): n stands for inosine
gauugguacugaugaggccguuaggccgaangaugaca

SEQ ID NO: 15674 - RNA, 38 nt, Artificial Sequence
  Description of Artificial Sequence:  Enzymatic Nucleic Acid
  misc_feature (31)..(31): n stands for inosine
augggauucugaugaggccguuaggccgaanuaaggau

SEQ ID NO: 15675 - RNA, 38 nt, Artificial Sequence
  Description of Artificial Sequence:  Enzymatic Nucleic Acid
  misc_feature (31)..(31): n stands for inosine
aaugggaucugaugaggccguuaggccgaanguaagga

SEQ ID NO: 15676 - RNA, 38 nt, Artificial Sequence
  Description of Artificial Sequence:  Enzymatic Nucleic Acid
  misc_feature (31)..(31): n stands for inosine
uugaaaugcugaugaggccguuaggccgaanauuggua

SEQ ID NO: 15677 - RNA, 38 nt, Artificial Sequence
  Description of Artificial Sequence:  Enzymatic Nucleic Acid
  misc_feature (31)..(31): n stands for inosine
uuugaaaucugaugaggccguuaggccgaangauuggu

SEQ ID NO: 15678 - RNA, 38 nt, Artificial Sequence
  Description of Artificial Sequence:  Enzymatic Nucleic Acid
  misc_feature (31)..(31): n stands for inosine
cuuugaaacugaugaggccguuaggccgaanggauugg

SEQ ID NO: 15679 - RNA, 38 nt, Artificial Sequence
  Description of Artificial Sequence:  Enzymatic Nucleic Acid
  misc_feature (31)..(31): n stands for inosine
uucuccuucugaugaggccguuaggccgaanaaauggg

SEQ ID NO: 15680 - RNA, 38 nt, Artificial Sequence
  Description of Artificial Sequence:  Enzymatic Nucleic Acid
  misc_feature (31)..(31): n stands for inosine
cauggcuccugaugaggccguuaggccgaancuucucc

SEQ ID NO: 15681 - RNA, 38 nt, Artificial Sequence
  Description of Artificial Sequence:  Enzymatic Nucleic Acid
  misc_feature (31)..(31): n stands for inosine
gaccacaucugaugaggccguuaggccgaancucugcu

SEQ ID NO: 15682 - RNA, 38 nt, Artificial Sequence
  Description of Artificial Sequence:  Enzymatic Nucleic Acid
  misc_feature (31)..(31): n stands for inosine
agaccacacugaugaggccguuaggccgaangcucugc

SEQ ID NO: 15683 - RNA, 38 nt, Artificial Sequence
  Description of Artificial Sequence:  Enzymatic Nucleic Acid
  misc_feature (31)..(31): n stands for inosine
aaccagagcugaugaggccguuaggccgaanaccacau

SEQ ID NO: 15684 - RNA, 38 nt, Artificial Sequence
  Description of Artificial Sequence:  Enzymatic Nucleic Acid
  misc_feature (31)..(31): n stands for inosine
acaaccagcugaugaggccguuaggccgaanagaccac

SEQ ID NO: 15685 - RNA, 38 nt, Artificial Sequence
  Description of Artificial Sequence:  Enzymatic Nucleic Acid
  misc_feature (31)..(31): n stands for inosine
acacaacccugaugaggccguuaggccgaanagagacc

SEQ ID NO: 15686 - RNA, 38 nt, Artificial Sequence
  Description of Artificial Sequence:  Enzymatic Nucleic Acid
  misc_feature (31)..(31): n stands for inosine
cuggggugcugaugaggccguuaggccgaanacauaca

SEQ ID NO: 15687 - RNA, 38 nt, Artificial Sequence
  Description of Artificial Sequence:  Enzymatic Nucleic Acid
  misc_feature (31)..(31): n stands for inosine
ucuggggucugaugaggccguuaggccgaangacauac

SEQ ID NO: 15688 - RNA, 38 nt, Artificial Sequence
  Description of Artificial Sequence:  Enzymatic Nucleic Acid
  misc_feature (31)..(31): n stands for inosine
aucuggggcugaugaggccguuaggccgaanggacaua

SEQ ID NO: 15689 - RNA, 38 nt, Artificial Sequence
  Description of Artificial Sequence:  Enzymatic Nucleic Acid
  misc_feature (31)..(31): n stands for inosine
caaucuggcugaugaggccguuaggccgaanugggaca

SEQ ID NO: 15690 - RNA, 38 nt, Artificial Sequence
  Description of Artificial Sequence:  Enzymatic Nucleic Acid
  misc_feature (31)..(31): n stands for inosine
ccaaucugcugaugaggccguuaggccgaangugggac

SEQ ID NO: 15691 - RNA, 38 nt, Artificial Sequence
  Description of Artificial Sequence:  Enzymatic Nucleic Acid
  misc_feature (31)..(31): n stands for inosine
accaaucucugaugaggccguuaggccgaangguggga

SEQ ID NO: 15692 - RNA, 38 nt, Artificial Sequence
  Description of Artificial Sequence:  Enzymatic Nucleic Acid
  misc_feature (31)..(31): n stands for inosine
caccaauccugaugaggccguuaggccgaanggguggg

SEQ ID NO: 15693 - RNA, 38 nt, Artificial Sequence
  Description of Artificial Sequence:  Enzymatic Nucleic Acid
  misc_feature (31)..(31): n stands for inosine
gagauuagcugaugaggccguuaggccgaanauuucuc

SEQ ID NO: 15694 - RNA, 38 nt, Artificial Sequence
  Description of Artificial Sequence:  Enzymatic Nucleic Acid
  misc_feature (31)..(31): n stands for inosine
gagagauucugaugaggccguuaggccgaanagauuuc

SEQ ID NO: 15695 - RNA, 38 nt, Artificial Sequence
  Description of Artificial Sequence:  Enzymatic Nucleic Acid
  misc_feature (31)..(31): n stands for inosine
cacaggagcugaugaggccguuaggccgaanauuagag

SEQ ID NO: 15696 - RNA, 38 nt, Artificial Sequence
  Description of Artificial Sequence:  Enzymatic Nucleic Acid
  misc_feature (31)..(31): n stands for inosine
uccacaggcugaugaggccguuaggccgaanagauuag

SEQ ID NO: 15697 - RNA, 38 nt, Artificial Sequence
  Description of Artificial Sequence:  Enzymatic Nucleic Acid
  misc_feature (31)..(31): n stands for inosine
aauccacacugaugaggccguuaggccgaanagagauu

SEQ ID NO: 15698 - RNA, 38 nt, Artificial Sequence
  Description of Artificial Sequence:  Enzymatic Nucleic Acid
  misc_feature (31)..(31): n stands for inosine
gaauccaccugaugaggccguuaggccgaangagagau

SEQ ID NO: 15699 - RNA, 38 nt, Artificial Sequence
  Description of Artificial Sequence:  Enzymatic Nucleic Acid
  misc_feature (31)..(31): n stands for inosine
uacugguacugaugaggccguuaggccgaanaauccac

SEQ ID NO: 15700 - RNA, 38 nt, Artificial Sequence
  Description of Artificial Sequence:  Enzymatic Nucleic Acid
  misc_feature (31)..(31): n stands for inosine
guacuggucugaugaggccguuaggccgaangaaucca

SEQ ID NO: 15701 - RNA, 38 nt, Artificial Sequence
  Description of Artificial Sequence:  Enzymatic Nucleic Acid
  misc_feature (31)..(31): n stands for inosine
gccguacucugaugaggccguuaggccgaanuaggaau

SEQ ID NO: 15702 - RNA, 38 nt, Artificial Sequence
  Description of Artificial Sequence:  Enzymatic Nucleic Acid
  misc_feature (31)..(31): n stands for inosine
ugccguaccugaugaggccguuaggccgaanguaggaa

SEQ ID NO: 15703 - RNA, 38 nt, Artificial Sequence
  Description of Artificial Sequence:  Enzymatic Nucleic Acid
  misc_feature (31)..(31): n stands for inosine
uugaguggcugaugaggccguuaggccgaanccguacu

SEQ ID NO: 15704 - RNA, 38 nt, Artificial Sequence
  Description of Artificial Sequence:  Enzymatic Nucleic Acid
  misc_feature (31)..(31): n stands for inosine
guuugagucugaugaggccguuaggccgaanugccgua

SEQ ID NO: 15705 - RNA, 38 nt, Artificial Sequence
  Description of Artificial Sequence:  Enzymatic Nucleic Acid
  misc_feature (31)..(31): n stands for inosine
cguuugagcugaugaggccguuaggccgaangugccgu

SEQ ID NO: 15706 - RNA, 38 nt, Artificial Sequence
  Description of Artificial Sequence:  Enzymatic Nucleic Acid
  misc_feature (31)..(31): n stands for inosine
agcguuugcugaugaggccguuaggccgaanuggugcc

SEQ ID NO: 15707 - RNA, 38 nt, Artificial Sequence
  Description of Artificial Sequence:  Enzymatic Nucleic Acid
  misc_feature (31)..(31): n stands for inosine
ucagcguucugaugaggccguuaggccgaanaguggug

SEQ ID NO: 15708 - RNA, 38 nt, Artificial Sequence
  Description of Artificial Sequence:  Enzymatic Nucleic Acid
  misc_feature (31)..(31): n stands for inosine
uacauguccugaugaggccguuaggccgaancguuuga

SEQ ID NO: 15709 - RNA, 38 nt, Artificial Sequence
  Description of Artificial Sequence:  Enzymatic Nucleic Acid
  misc_feature (31)..(31): n stands for inosine
accguacacugaugaggccguuaggccgaanucagcgu

SEQ ID NO: 15710 - RNA, 38 nt, Artificial Sequence
  Description of Artificial Sequence:  Enzymatic Nucleic Acid
  misc_feature (31)..(31): n stands for inosine
aauggcaucugaugaggccguuaggccgaanaccguac

SEQ ID NO: 15711 - RNA, 38 nt, Artificial Sequence
  Description of Artificial Sequence:  Enzymatic Nucleic Acid
  misc_feature (31)..(31): n stands for inosine
ggaggaaucugaugaggccguuaggccgaancauagac

SEQ ID NO: 15712 - RNA, 38 nt, Artificial Sequence
  Description of Artificial Sequence:  Enzymatic Nucleic Acid
  misc_feature (31)..(31): n stands for inosine
gggaggaacugaugaggccguuaggccgaangcauaga

SEQ ID NO: 15713 - RNA, 38 nt, Artificial Sequence
  Description of Artificial Sequence:  Enzymatic Nucleic Acid
  misc_feature (31)..(31): n stands for inosine
gcgggggacugaugaggccguuaggccgaanaauggca

SEQ ID NO: 15714 - RNA, 38 nt, Artificial Sequence
  Description of Artificial Sequence:  Enzymatic Nucleic Acid
  misc_feature (31)..(31): n stands for inosine
ugcgggggcugaugaggccguuaggccgaangaauggc

SEQ ID NO: 15715 - RNA, 38 nt, Artificial Sequence
  Description of Artificial Sequence:  Enzymatic Nucleic Acid
  misc_feature (31)..(31): n stands for inosine
gaugcgggcugaugaggccguuaggccgaanaggaaug

SEQ ID NO: 15716 - RNA, 38 nt, Artificial Sequence
  Description of Artificial Sequence:  Enzymatic Nucleic Acid
  misc_feature (31)..(31): n stands for inosine
ugaugcggcugaugaggccguuaggccgaangaggaau

SEQ ID NO: 15717 - RNA, 38 nt, Artificial Sequence
  Description of Artificial Sequence:  Enzymatic Nucleic Acid
  misc_feature (31)..(31): n stands for inosine
gugaugcgcugaugaggccguuaggccgaanggaggaa

SEQ ID NO: 15718 - RNA, 38 nt, Artificial Sequence
  Description of Artificial Sequence:  Enzymatic Nucleic Acid
  misc_feature (31)..(31): n stands for inosine
ugugaugccugaugaggccguuaggccgaangggagga

SEQ ID NO: 15719 - RNA, 38 nt, Artificial Sequence
  Description of Artificial Sequence:  Enzymatic Nucleic Acid
  misc_feature (31)..(31): n stands for inosine
ggaugugacugaugaggccguuaggccgaancggggga

SEQ ID NO: 15720 - RNA, 38 nt, Artificial Sequence
  Description of Artificial Sequence:  Enzymatic Nucleic Acid
  misc_feature (31)..(31): n stands for inosine
aguggaugcugaugaggccguuaggccgaanaugcggg

SEQ ID NO: 15721 - RNA, 38 nt, Artificial Sequence
  Description of Artificial Sequence:  Enzymatic Nucleic Acid
  misc_feature (31)..(31): n stands for inosine
ccaguggacugaugaggccguuaggccgaanugaugcg

SEQ ID NO: 15722 - RNA, 38 nt, Artificial Sequence
  Description of Artificial Sequence:  Enzymatic Nucleic Acid
  misc_feature (31)..(31): n stands for inosine
auaccagucugaugaggccguuaggccgaanaugugau

SEQ ID NO: 15723 - RNA, 38 nt, Artificial Sequence
  Description of Artificial Sequence:  Enzymatic Nucleic Acid
  misc_feature (31)..(31): n stands for inosine
aauaccagcugaugaggccguuaggccgaangauguga

SEQ ID NO: 15724 - RNA, 38 nt, Artificial Sequence
  Description of Artificial Sequence:  Enzymatic Nucleic Acid
  misc_feature (31)..(31): n stands for inosine
ccaauacccugaugaggccguuaggccgaanuggaugu

SEQ ID NO: 15725 - RNA, 38 nt, Artificial Sequence
  Description of Artificial Sequence:  Enzymatic Nucleic Acid
  misc_feature (31)..(31): n stands for inosine
ccuccaaccugaugaggccguuaggccgaanccaauac

SEQ ID NO: 15726 - RNA, 38 nt, Artificial Sequence
  Description of Artificial Sequence:  Enzymatic Nucleic Acid
  misc_feature (31)..(31): n stands for inosine
ggcucguucugaugaggccguuaggccgaancgcacuc

SEQ ID NO: 15727 - RNA, 38 nt, Artificial Sequence
  Description of Artificial Sequence:  Enzymatic Nucleic Acid
  misc_feature (31)..(31): n stands for inosine
gggcucgucugaugaggccguuaggccgaangcgcacu

SEQ ID NO: 15728 - RNA, 38 nt, Artificial Sequence
  Description of Artificial Sequence:  Enzymatic Nucleic Acid
  misc_feature (31)..(31): n stands for inosine
cuuggcugcugaugaggccguuaggccgaancucguug

SEQ ID NO: 15729 - RNA, 38 nt, Artificial Sequence
  Description of Artificial Sequence:  Enzymatic Nucleic Acid
  misc_feature (31)..(31): n stands for inosine
gcuuggcucugaugaggccguuaggccgaangcucguu

SEQ ID NO: 15730 - RNA, 38 nt, Artificial Sequence
  Description of Artificial Sequence:  Enzymatic Nucleic Acid
  misc_feature (31)..(31): n stands for inosine
agcuuggccugaugaggccguuaggccgaanggcucgu

SEQ ID NO: 15731 - RNA, 38 nt, Artificial Sequence
  Description of Artificial Sequence:  Enzymatic Nucleic Acid
  misc_feature (31)..(31): n stands for inosine
gacagcuucugaugaggccguuaggccgaancugggcu

SEQ ID NO: 15732 - RNA, 38 nt, Artificial Sequence
  Description of Artificial Sequence:  Enzymatic Nucleic Acid
  misc_feature (31)..(31): n stands for inosine
agacagcucugaugaggccguuaggccgaangcugggc

SEQ ID NO: 15733 - RNA, 38 nt, Artificial Sequence
  Description of Artificial Sequence:  Enzymatic Nucleic Acid
  misc_feature (31)..(31): n stands for inosine
acugagaccugaugaggccguuaggccgaancuuggcu

SEQ ID NO: 15734 - RNA, 38 nt, Artificial Sequence
  Description of Artificial Sequence:  Enzymatic Nucleic Acid
  misc_feature (31)..(31): n stands for inosine
ugucacugcugaugaggccguuaggccgaanacagcuu

SEQ ID NO: 15735 - RNA, 38 nt, Artificial Sequence
  Description of Artificial Sequence:  Enzymatic Nucleic Acid
  misc_feature (31)..(31): n stands for inosine
uuugucaccugaugaggccguuaggccgaanagacagc

SEQ ID NO: 15736 - RNA, 38 nt, Artificial Sequence
  Description of Artificial Sequence:  Enzymatic Nucleic Acid
  misc_feature (31)..(31): n stands for inosine
uauggguucugaugaggccguuaggccgaanucacuga

SEQ ID NO: 15737 - RNA, 38 nt, Artificial Sequence
  Description of Artificial Sequence:  Enzymatic Nucleic Acid
  misc_feature (31)..(31): n stands for inosine
aggguaugcugaugaggccguuaggccgaanuuuguca

SEQ ID NO: 15738 - RNA, 38 nt, Artificial Sequence
  Description of Artificial Sequence:  Enzymatic Nucleic Acid
  misc_feature (31)..(31): n stands for inosine
aaggguaucugaugaggccguuaggccgaanguuuguc

SEQ ID NO: 15739 - RNA, 38 nt, Artificial Sequence
  Description of Artificial Sequence:  Enzymatic Nucleic Acid
  misc_feature (31)..(31): n stands for inosine
caaggguacugaugaggccguuaggccgaangguuugu

SEQ ID NO: 15740 - RNA, 38 nt, Artificial Sequence
  Description of Artificial Sequence:  Enzymatic Nucleic Acid
  misc_feature (31)..(31): n stands for inosine
uucacaagcugaugaggccguuaggccgaanuaugggu

SEQ ID NO: 15741 - RNA, 38 nt, Artificial Sequence
  Description of Artificial Sequence:  Enzymatic Nucleic Acid
  misc_feature (31)..(31): n stands for inosine
cuucacaacugaugaggccguuaggccgaanguauggg

SEQ ID NO: 15742 - RNA, 38 nt, Artificial Sequence
  Description of Artificial Sequence:  Enzymatic Nucleic Acid
  misc_feature (31)..(31): n stands for inosine
ucuucacacugaugaggccguuaggccgaangguaugg

SEQ ID NO: 15743 - RNA, 38 nt, Artificial Sequence
  Description of Artificial Sequence:  Enzymatic Nucleic Acid
  misc_feature (31)..(31): n stands for inosine
ucccuggacugaugaggccguuaggccgaanuccucca

SEQ ID NO: 15744 - RNA, 38 nt, Artificial Sequence
  Description of Artificial Sequence:  Enzymatic Nucleic Acid
  misc_feature (31)..(31): n stands for inosine
uccucccucugaugaggccguuaggccgaanaaguccu

SEQ ID NO: 15745 - RNA, 38 nt, Artificial Sequence
  Description of Artificial Sequence:  Enzymatic Nucleic Acid
  misc_feature (31)..(31): n stands for inosine
uuccuccccugaugaggccguuaggccgaangaagucc

SEQ ID NO: 15746 - RNA, 38 nt, Artificial Sequence
  Description of Artificial Sequence:  Enzymatic Nucleic Acid
  misc_feature (31)..(31): n stands for inosine
gagcaaaucugaugaggccguuaggccgaanauuuuua

SEQ ID NO: 15747 - RNA, 38 nt, Artificial Sequence
  Description of Artificial Sequence:  Enzymatic Nucleic Acid
  misc_feature (31)..(31): n stands for inosine
ucaauuagcugaugaggccguuaggccgaancaaauug

SEQ ID NO: 15748 - RNA, 38 nt, Artificial Sequence
  Description of Artificial Sequence:  Enzymatic Nucleic Acid
  misc_feature (31)..(31): n stands for inosine
cuucaauucugaugaggccguuaggccgaanagcaaau

SEQ ID NO: 15749 - RNA, 38 nt, Artificial Sequence
  Description of Artificial Sequence:  Enzymatic Nucleic Acid
  misc_feature (31)..(31): n stands for inosine
uacaguuucugaugaggccguuaggccgaanuuuuuuc

SEQ ID NO: 15750 - RNA, 38 nt, Artificial Sequence
  Description of Artificial Sequence:  Enzymatic Nucleic Acid
  misc_feature (31)..(31): n stands for inosine
guacuuaccugaugaggccguuaggccgaanuuuuguu

SEQ ID NO: 15751 - RNA, 38 nt, Artificial Sequence
  Description of Artificial Sequence:  Enzymatic Nucleic Acid
  misc_feature (31)..(31): n stands for inosine
auaacaagcugaugaggccguuaggccgaanuacuuac

SEQ ID NO: 15752 - RNA, 38 nt, Artificial Sequence
  Description of Artificial Sequence:  Enzymatic Nucleic Acid
  misc_feature (31)..(31): n stands for inosine
gauaacaacugaugaggccguuaggccgaanguacuua

SEQ ID NO: 15753 - RNA, 38 nt, Artificial Sequence
  Description of Artificial Sequence:  Enzymatic Nucleic Acid
  misc_feature (31)..(31): n stands for inosine
ggauaacacugaugaggccguuaggccgaangguacuu

SEQ ID NO: 15754 - RNA, 38 nt, Artificial Sequence
  Description of Artificial Sequence:  Enzymatic Nucleic Acid
  misc_feature (31)..(31): n stands for inosine
ugccgcuucugaugaggccguuaggccgaanauaacaa

SEQ ID NO: 15755 - RNA, 38 nt, Artificial Sequence
  Description of Artificial Sequence:  Enzymatic Nucleic Acid
  misc_feature (31)..(31): n stands for inosine
uugccgcucugaugaggccguuaggccgaangauaaca

SEQ ID NO: 15756 - RNA, 38 nt, Artificial Sequence
  Description of Artificial Sequence:  Enzymatic Nucleic Acid
  misc_feature (31)..(31): n stands for inosine
gacacauucugaugaggccguuaggccgaanccgcuug

SEQ ID NO: 15757 - RNA, 38 nt, Artificial Sequence
  Description of Artificial Sequence:  Enzymatic Nucleic Acid
  misc_feature (31)..(31): n stands for inosine
uacaaagccugaugaggccguuaggccgaanacacauu

SEQ ID NO: 15758 - RNA, 38 nt, Artificial Sequence
  Description of Artificial Sequence:  Enzymatic Nucleic Acid
  misc_feature (31)..(31): n stands for inosine
uuguacaacugaugaggccguuaggccgaancugacac

SEQ ID NO: 15759 - RNA, 38 nt, Artificial Sequence
  Description of Artificial Sequence:  Enzymatic Nucleic Acid
  misc_feature (31)..(31): n stands for inosine
uucacauucugaugaggccguuaggccgaanuacaaag

SEQ ID NO: 15760 - RNA, 38 nt, Artificial Sequence
  Description of Artificial Sequence:  Enzymatic Nucleic Acid
  misc_feature (31)..(31): n stands for inosine
gacuuugucugaugaggccguuaggccgaanaccgcuu

SEQ ID NO: 15761 - RNA, 38 nt, Artificial Sequence
  Description of Artificial Sequence:  Enzymatic Nucleic Acid
  misc_feature (31)..(31): n stands for inosine
cccgacuucugaugaggccguuaggccgaanuugaccg

SEQ ID NO: 15762 - RNA, 38 nt, Artificial Sequence
  Description of Artificial Sequence:  Enzymatic Nucleic Acid
  misc_feature (31)..(31): n stands for inosine
guggaaggcugaugaggccguuaggccgaanaucaccc

SEQ ID NO: 15763 - RNA, 38 nt, Artificial Sequence
  Description of Artificial Sequence:  Enzymatic Nucleic Acid
  misc_feature (31)..(31): n stands for inosine
acguggaacugaugaggccguuaggccgaanagaucac

SEQ ID NO: 15764 - RNA, 38 nt, Artificial Sequence
  Description of Artificial Sequence:  Enzymatic Nucleic Acid
  misc_feature (31)..(31): n stands for inosine
cacguggacugaugaggccguuaggccgaangagauca

SEQ ID NO: 15765 - RNA, 38 nt, Artificial Sequence
  Description of Artificial Sequence:  Enzymatic Nucleic Acid
  misc_feature (31)..(31): n stands for inosine
ggucacgucugaugaggccguuaggccgaanaaggaga

SEQ ID NO: 15766 - RNA, 38 nt, Artificial Sequence
  Description of Artificial Sequence:  Enzymatic Nucleic Acid
  misc_feature (31)..(31): n stands for inosine
uggucacgcugaugaggccguuaggccgaangaaggag

SEQ ID NO: 15767 - RNA, 38 nt, Artificial Sequence
  Description of Artificial Sequence:  Enzymatic Nucleic Acid
  misc_feature (31)..(31): n stands for inosine
ggaccccucugaugaggccguuaggccgaanucacgug

SEQ ID NO: 15768 - RNA, 38 nt, Artificial Sequence
  Description of Artificial Sequence:  Enzymatic Nucleic Acid
  misc_feature (31)..(31): n stands for inosine
aggacccccugaugaggccguuaggccgaangucacgu

SEQ ID NO: 15769 - RNA, 38 nt, Artificial Sequence
  Description of Artificial Sequence:  Enzymatic Nucleic Acid
  misc_feature (31)..(31): n stands for inosine
uaauuucacugaugaggccguuaggccgaanaccccug

SEQ ID NO: 15770 - RNA, 38 nt, Artificial Sequence
  Description of Artificial Sequence:  Enzymatic Nucleic Acid
  misc_feature (31)..(31): n stands for inosine
guaauuuccugaugaggccguuaggccgaangaccccu

SEQ ID NO: 15771 - RNA, 38 nt, Artificial Sequence
  Description of Artificial Sequence:  Enzymatic Nucleic Acid
  misc_feature (31)..(31): n stands for inosine
gguugcaacugaugaggccguuaggccgaanuaauuuc

SEQ ID NO: 15772 - RNA, 38 nt, Artificial Sequence
  Description of Artificial Sequence:  Enzymatic Nucleic Acid
  misc_feature (31)..(31): n stands for inosine
ugucaggucugaugaggccguuaggccgaancaaagua

SEQ ID NO: 15773 - RNA, 38 nt, Artificial Sequence
  Description of Artificial Sequence:  Enzymatic Nucleic Acid
  misc_feature (31)..(31): n stands for inosine
gcaugucacugaugaggccguuaggccgaanuugcaaa

SEQ ID NO: 15774 - RNA, 38 nt, Artificial Sequence
  Description of Artificial Sequence:  Enzymatic Nucleic Acid
  misc_feature (31)..(31): n stands for inosine
ugcauguccugaugaggccguuaggccgaanguugcaa

SEQ ID NO: 15775 - RNA, 38 nt, Artificial Sequence
  Description of Artificial Sequence:  Enzymatic Nucleic Acid
  misc_feature (31)..(31): n stands for inosine
gggcugcacugaugaggccguuaggccgaanucagguu

SEQ ID NO: 15776 - RNA, 38 nt, Artificial Sequence
  Description of Artificial Sequence:  Enzymatic Nucleic Acid
  misc_feature (31)..(31): n stands for inosine
cagugggccugaugaggccguuaggccgaancauguca

SEQ ID NO: 15777 - RNA, 38 nt, Artificial Sequence
  Description of Artificial Sequence:  Enzymatic Nucleic Acid
  misc_feature (31)..(31): n stands for inosine
gcucagugcugaugaggccguuaggccgaancugcaug

SEQ ID NO: 15778 - RNA, 38 nt, Artificial Sequence
  Description of Artificial Sequence:  Enzymatic Nucleic Acid
  misc_feature (31)..(31): n stands for inosine
ugcucagucugaugaggccguuaggccgaangcugcau

SEQ ID NO: 15779 - RNA, 38 nt, Artificial Sequence
  Description of Artificial Sequence:  Enzymatic Nucleic Acid
  misc_feature (31)..(31): n stands for inosine
cugcucagcugaugaggccguuaggccgaanggcugca

SEQ ID NO: 15780 - RNA, 38 nt, Artificial Sequence
  Description of Artificial Sequence:  Enzymatic Nucleic Acid
  misc_feature (31)..(31): n stands for inosine
uccugcuccugaugaggccguuaggccgaanugggcug

SEQ ID NO: 15781 - RNA, 38 nt, Artificial Sequence
  Description of Artificial Sequence:  Enzymatic Nucleic Acid
  misc_feature (31)..(31): n stands for inosine
cgcucucccugaugaggccguuaggccgaancucagug

SEQ ID NO: 15782 - RNA, 38 nt, Artificial Sequence
  Description of Artificial Sequence:  Enzymatic Nucleic Acid
  misc_feature (31)..(31): n stands for inosine
caccacaacugaugaggccguuaggccgaanacacgcu

SEQ ID NO: 15783 - RNA, 38 nt, Artificial Sequence
  Description of Artificial Sequence:  Enzymatic Nucleic Acid
  misc_feature (31)..(31): n stands for inosine
gucugcagcugaugaggccguuaggccgaancaccaca

SEQ ID NO: 15784 - RNA, 38 nt, Artificial Sequence
  Description of Artificial Sequence:  Enzymatic Nucleic Acid
  misc_feature (31)..(31): n stands for inosine
cugucugccugaugaggccguuaggccgaanugcacca

SEQ ID NO: 15785 - RNA, 38 nt, Artificial Sequence
  Description of Artificial Sequence:  Enzymatic Nucleic Acid
  misc_feature (31)..(31): n stands for inosine
gaucuguccugaugaggccguuaggccgaancagugca

SEQ ID NO: 15786 - RNA, 38 nt, Artificial Sequence
  Description of Artificial Sequence:  Enzymatic Nucleic Acid
  misc_feature (31)..(31): n stands for inosine
cguagauccugaugaggccguuaggccgaanucugcag

SEQ ID NO: 15787 - RNA, 38 nt, Artificial Sequence
  Description of Artificial Sequence:  Enzymatic Nucleic Acid
  misc_feature (31)..(31): n stands for inosine
ucaaacgucugaugaggccguuaggccgaanaucuguc

SEQ ID NO: 15788 - RNA, 38 nt, Artificial Sequence
  Description of Artificial Sequence:  Enzymatic Nucleic Acid
  misc_feature (31)..(31): n stands for inosine
ccaugugacugaugaggccguuaggccgaanuucucaa

SEQ ID NO: 15789 - RNA, 38 nt, Artificial Sequence
  Description of Artificial Sequence:  Enzymatic Nucleic Acid
  misc_feature (31)..(31): n stands for inosine
accaugugcugaugaggccguuaggccgaanguucuca

SEQ ID NO: 15790 - RNA, 38 nt, Artificial Sequence
  Description of Artificial Sequence:  Enzymatic Nucleic Acid
  misc_feature (31)..(31): n stands for inosine
guaccaugcugaugaggccguuaggccgaanagguucu

SEQ ID NO: 15791 - RNA, 38 nt, Artificial Sequence
  Description of Artificial Sequence:  Enzymatic Nucleic Acid
  misc_feature (31)..(31): n stands for inosine
uuguaccacugaugaggccguuaggccgaanugagguu

SEQ ID NO: 15792 - RNA, 38 nt, Artificial Sequence
  Description of Artificial Sequence:  Enzymatic Nucleic Acid
  misc_feature (31)..(31): n stands for inosine
gccaagcucugaugaggccguuaggccgaanuaccaug

SEQ ID NO: 15793 - RNA, 38 nt, Artificial Sequence
  Description of Artificial Sequence:  Enzymatic Nucleic Acid
  misc_feature (31)..(31): n stands for inosine
gugggccacugaugaggccguuaggccgaancuuguac

SEQ ID NO: 15794 - RNA, 38 nt, Artificial Sequence
  Description of Artificial Sequence:  Enzymatic Nucleic Acid
  misc_feature (31)..(31): n stands for inosine
aggcugugcugaugaggccguuaggccgaanccaagcu

SEQ ID NO: 15795 - RNA, 38 nt, Artificial Sequence
  Description of Artificial Sequence:  Enzymatic Nucleic Acid
  misc_feature (31)..(31): n stands for inosine
gaggcugucugaugaggccguuaggccgaangccaagc

SEQ ID NO: 15796 - RNA, 38 nt, Artificial Sequence
  Description of Artificial Sequence:  Enzymatic Nucleic Acid
  misc_feature (31)..(31): n stands for inosine
agaggcugcugaugaggccguuaggccgaanggccaag

SEQ ID NO: 15797 - RNA, 38 nt, Artificial Sequence
  Description of Artificial Sequence:  Enzymatic Nucleic Acid
  misc_feature (31)..(31): n stands for inosine
gcagaggccugaugaggccguuaggccgaanugggcca

SEQ ID NO: 15798 - RNA, 38 nt, Artificial Sequence
  Description of Artificial Sequence:  Enzymatic Nucleic Acid
  misc_feature (31)..(31): n stands for inosine
uuggcagacugaugaggccguuaggccgaancuguggg

SEQ ID NO: 15799 - RNA, 38 nt, Artificial Sequence
  Description of Artificial Sequence:  Enzymatic Nucleic Acid
  misc_feature (31)..(31): n stands for inosine
auuggcagcugaugaggccguuaggccgaangcugugg

SEQ ID NO: 15800 - RNA, 38 nt, Artificial Sequence
  Description of Artificial Sequence:  Enzymatic Nucleic Acid
  misc_feature (31)..(31): n stands for inosine
ggauuggccugaugaggccguuaggccgaanaggcugu

SEQ ID NO: 15801 - RNA, 38 nt, Artificial Sequence
  Description of Artificial Sequence:  Enzymatic Nucleic Acid
  misc_feature (31)..(31): n stands for inosine
cauggauucugaugaggccguuaggccgaancagaggc

SEQ ID NO: 15802 - RNA, 38 nt, Artificial Sequence
  Description of Artificial Sequence:  Enzymatic Nucleic Acid
  misc_feature (31)..(31): n stands for inosine
acauggaucugaugaggccguuaggccgaangcagagg

SEQ ID NO: 15803 - RNA, 38 nt, Artificial Sequence
  Description of Artificial Sequence:  Enzymatic Nucleic Acid
  misc_feature (31)..(31): n stands for inosine
ucccacaucugaugaggccguuaggccgaanauuggca

SEQ ID NO: 15804 - RNA, 38 nt, Artificial Sequence
  Description of Artificial Sequence:  Enzymatic Nucleic Acid
  misc_feature (31)..(31): n stands for inosine
cucccacacugaugaggccguuaggccgaangauuggc

SEQ ID NO: 15805 - RNA, 38 nt, Artificial Sequence
  Description of Artificial Sequence:  Enzymatic Nucleic Acid
  misc_feature (31)..(31): n stands for inosine
caggugugcugaugaggccguuaggccgaancaacucu

SEQ ID NO: 15806 - RNA, 38 nt, Artificial Sequence
  Description of Artificial Sequence:  Enzymatic Nucleic Acid
  misc_feature (31)..(31): n stands for inosine
acaggugucugaugaggccguuaggccgaangcaacuc

SEQ ID NO: 15807 - RNA, 38 nt, Artificial Sequence
  Description of Artificial Sequence:  Enzymatic Nucleic Acid
  misc_feature (31)..(31): n stands for inosine
aacaggugcugaugaggccguuaggccgaanggcaacu

SEQ ID NO: 15808 - RNA, 38 nt, Artificial Sequence
  Description of Artificial Sequence:  Enzymatic Nucleic Acid
  misc_feature (31)..(31): n stands for inosine
caaacaggcugaugaggccguuaggccgaanugggcaa

SEQ ID NO: 15809 - RNA, 38 nt, Artificial Sequence
  Description of Artificial Sequence:  Enzymatic Nucleic Acid
  misc_feature (31)..(31): n stands for inosine
ugcaaacacugaugaggccguuaggccgaanugugggc

SEQ ID NO: 15810 - RNA, 38 nt, Artificial Sequence
  Description of Artificial Sequence:  Enzymatic Nucleic Acid
  misc_feature (31)..(31): n stands for inosine
uugcaaaccugaugaggccguuaggccgaanguguggg

SEQ ID NO: 15811 - RNA, 38 nt, Artificial Sequence
  Description of Artificial Sequence:  Enzymatic Nucleic Acid
  misc_feature (31)..(31): n stands for inosine
caaguucucugaugaggccguuaggccgaancaaacag

SEQ ID NO: 15812 - RNA, 38 nt, Artificial Sequence
  Description of Artificial Sequence:  Enzymatic Nucleic Acid
  misc_feature (31)..(31): n stands for inosine
aguauccacugaugaggccguuaggccgaanuucuugc

SEQ ID NO: 15813 - RNA, 38 nt, Artificial Sequence
  Description of Artificial Sequence:  Enzymatic Nucleic Acid
  misc_feature (31)..(31): n stands for inosine
uuccaaagcugaugaggccguuaggccgaanuauccaa

SEQ ID NO: 15814 - RNA, 38 nt, Artificial Sequence
  Description of Artificial Sequence:  Enzymatic Nucleic Acid
  misc_feature (31)..(31): n stands for inosine
auuuccaacugaugaggccguuaggccgaanaguaucc

SEQ ID NO: 15815 - RNA, 38 nt, Artificial Sequence
  Description of Artificial Sequence:  Enzymatic Nucleic Acid
  misc_feature (31)..(31): n stands for inosine
aacauggucugaugaggccguuaggccgaancauucaa

SEQ ID NO: 15816 - RNA, 38 nt, Artificial Sequence
  Description of Artificial Sequence:  Enzymatic Nucleic Acid
  misc_feature (31)..(31): n stands for inosine
gaacauggcugaugaggccguuaggccgaangcauuca

SEQ ID NO: 15817 - RNA, 38 nt, Artificial Sequence
  Description of Artificial Sequence:  Enzymatic Nucleic Acid
  misc_feature (31)..(31): n stands for inosine
gagaacaucugaugaggccguuaggccgaanuggcauu

SEQ ID NO: 15818 - RNA, 38 nt, Artificial Sequence
  Description of Artificial Sequence:  Enzymatic Nucleic Acid
  misc_feature (31)..(31): n stands for inosine
agagaacacugaugaggccguuaggccgaanguggcau

SEQ ID NO: 15819 - RNA, 38 nt, Artificial Sequence
  Description of Artificial Sequence:  Enzymatic Nucleic Acid
  misc_feature (31)..(31): n stands for inosine
gcuauuagcugaugaggccguuaggccgaanaacaugg

SEQ ID NO: 15820 - RNA, 38 nt, Artificial Sequence
  Description of Artificial Sequence:  Enzymatic Nucleic Acid
  misc_feature (31)..(31): n stands for inosine
gugcuauucugaugaggccguuaggccgaanagaacau

SEQ ID NO: 15821 - RNA, 38 nt, Artificial Sequence
  Description of Artificial Sequence:  Enzymatic Nucleic Acid
  misc_feature (31)..(31): n stands for inosine
gucauuugcugaugaggccguuaggccgaancuauuag

SEQ ID NO: 15822 - RNA, 38 nt, Artificial Sequence
  Description of Artificial Sequence:  Enzymatic Nucleic Acid
  misc_feature (31)..(31): n stands for inosine
augucauucugaugaggccguuaggccgaanugcuauu

SEQ ID NO: 15823 - RNA, 38 nt, Artificial Sequence
  Description of Artificial Sequence:  Enzymatic Nucleic Acid
  misc_feature (31)..(31): n stands for inosine
gaucaaaacugaugaggccguuaggccgaanucauuug

SEQ ID NO: 15824 - RNA, 38 nt, Artificial Sequence
  Description of Artificial Sequence:  Enzymatic Nucleic Acid
  misc_feature (31)..(31): n stands for inosine
aagcuccacugaugaggccguuaggccgaanaucaaaa

SEQ ID NO: 15825 - RNA, 38 nt, Artificial Sequence
  Description of Artificial Sequence:  Enzymatic Nucleic Acid
  misc_feature (31)..(31): n stands for inosine
cauucuuacugaugaggccguuaggccgaancuccaug

SEQ ID NO: 15826 - RNA, 38 nt, Artificial Sequence
  Description of Artificial Sequence:  Enzymatic Nucleic Acid
  misc_feature (31)..(31): n stands for inosine
ugcaaggacugaugaggccguuaggccgaancauucuu

SEQ ID NO: 15827 - RNA, 38 nt, Artificial Sequence
  Description of Artificial Sequence:  Enzymatic Nucleic Acid
  misc_feature (31)..(31): n stands for inosine
uccugcaacugaugaggccguuaggccgaanaugcauu

SEQ ID NO: 15828 - RNA, 38 nt, Artificial Sequence
  Description of Artificial Sequence:  Enzymatic Nucleic Acid
  misc_feature (31)..(31): n stands for inosine
guccugcacugaugaggccguuaggccgaangaugcau

SEQ ID NO: 15829 - RNA, 38 nt, Artificial Sequence
  Description of Artificial Sequence:  Enzymatic Nucleic Acid
  misc_feature (31)..(31): n stands for inosine
cuuggucccugaugaggccguuaggccgaancaaggau

SEQ ID NO: 15830 - RNA, 38 nt, Artificial Sequence
  Description of Artificial Sequence:  Enzymatic Nucleic Acid
  misc_feature (31)..(31): n stands for inosine
gucuccuucugaugaggccguuaggccgaanuccugca

SEQ ID NO: 15831 - RNA, 38 nt, Artificial Sequence
  Description of Artificial Sequence:  Enzymatic Nucleic Acid
  misc_feature (31)..(31): n stands for inosine
agucuccucugaugaggccguuaggccgaanguccugc

SEQ ID NO: 15832 - RNA, 38 nt, Artificial Sequence
  Description of Artificial Sequence:  Enzymatic Nucleic Acid
  misc_feature (31)..(31): n stands for inosine
gcagacaucugaugaggccguuaggccgaanucuccuu

SEQ ID NO: 15833 - RNA, 38 nt, Artificial Sequence
  Description of Artificial Sequence:  Enzymatic Nucleic Acid
  misc_feature (31)..(31): n stands for inosine
agcaaggccugaugaggccguuaggccgaanacauagu

SEQ ID NO: 15834 - RNA, 38 nt, Artificial Sequence
  Description of Artificial Sequence:  Enzymatic Nucleic Acid
  misc_feature (31)..(31): n stands for inosine
uugagcaacugaugaggccguuaggccgaancagacau

SEQ ID NO: 15835 - RNA, 38 nt, Artificial Sequence
  Description of Artificial Sequence:  Enzymatic Nucleic Acid
  misc_feature (31)..(31): n stands for inosine
cuugagcacugaugaggccguuaggccgaangcagaca

SEQ ID NO: 15836 - RNA, 38 nt, Artificial Sequence
  Description of Artificial Sequence:  Enzymatic Nucleic Acid
  misc_feature (31)..(31): n stands for inosine
cugucuugcugaugaggccguuaggccgaancaaggca

SEQ ID NO: 15837 - RNA, 38 nt, Artificial Sequence
  Description of Artificial Sequence:  Enzymatic Nucleic Acid
  misc_feature (31)..(31): n stands for inosine
uccugucucugaugaggccguuaggccgaanagcaagg

SEQ ID NO: 15838 - RNA, 38 nt, Artificial Sequence
  Description of Artificial Sequence:  Enzymatic Nucleic Acid
  misc_feature (31)..(31): n stands for inosine
ggucuucccugaugaggccguuaggccgaanucuugag

SEQ ID NO: 15839 - RNA, 38 nt, Artificial Sequence
  Description of Artificial Sequence:  Enzymatic Nucleic Acid
  misc_feature (31)..(31): n stands for inosine
cuuuucuucugaugaggccguuaggccgaanucuuccu

SEQ ID NO: 15840 - RNA, 38 nt, Artificial Sequence
  Description of Artificial Sequence:  Enzymatic Nucleic Acid
  misc_feature (31)..(31): n stands for inosine
ucuuuucucugaugaggccguuaggccgaangucuucc

SEQ ID NO: 15841 - RNA, 38 nt, Artificial Sequence
  Description of Artificial Sequence:  Enzymatic Nucleic Acid
  misc_feature (31)..(31): n stands for inosine
ccacgcaacugaugaggccguuaggccgaanucuuuuc

SEQ ID NO: 15842 - RNA, 38 nt, Artificial Sequence
  Description of Artificial Sequence:  Enzymatic Nucleic Acid
  misc_feature (31)..(31): n stands for inosine
gagcugcccugaugaggccguuaggccgaanaccacgc

SEQ ID NO: 15843 - RNA, 38 nt, Artificial Sequence
  Description of Artificial Sequence:  Enzymatic Nucleic Acid
  misc_feature (31)..(31): n stands for inosine
cugugagccugaugaggccguuaggccgaanccugacc

SEQ ID NO: 15844 - RNA, 38 nt, Artificial Sequence
  Description of Artificial Sequence:  Enzymatic Nucleic Acid
  misc_feature (31)..(31): n stands for inosine
ggacugugcugaugaggccguuaggccgaancugccug

SEQ ID NO: 15845 - RNA, 38 nt, Artificial Sequence
  Description of Artificial Sequence:  Enzymatic Nucleic Acid
  misc_feature (31)..(31): n stands for inosine
uaggacugcugaugaggccguuaggccgaanagcugcc

SEQ ID NO: 15846 - RNA, 38 nt, Artificial Sequence
  Description of Artificial Sequence:  Enzymatic Nucleic Acid
  misc_feature (31)..(31): n stands for inosine
ucuaggaccugaugaggccguuaggccgaanugagcug

SEQ ID NO: 15847 - RNA, 38 nt, Artificial Sequence
  Description of Artificial Sequence:  Enzymatic Nucleic Acid
  misc_feature (31)..(31): n stands for inosine
acgcucuacugaugaggccguuaggccgaanacuguga

SEQ ID NO: 15848 - RNA, 38 nt, Artificial Sequence
  Description of Artificial Sequence:  Enzymatic Nucleic Acid
  misc_feature (31)..(31): n stands for inosine
cacgcucucugaugaggccguuaggccgaangacugug

SEQ ID NO: 15849 - RNA, 38 nt, Artificial Sequence
  Description of Artificial Sequence:  Enzymatic Nucleic Acid
  misc_feature (31)..(31): n stands for inosine
aucgugggcugaugaggccguuaggccgaanccacacg

SEQ ID NO: 15850 - RNA, 38 nt, Artificial Sequence
  Description of Artificial Sequence:  Enzymatic Nucleic Acid
  misc_feature (31)..(31): n stands for inosine
ugaucgugcugaugaggccguuaggccgaanugccaca

SEQ ID NO: 15851 - RNA, 38 nt, Artificial Sequence
  Description of Artificial Sequence:  Enzymatic Nucleic Acid
  misc_feature (31)..(31): n stands for inosine
gugaucgucugaugaggccguuaggccgaangugccac

SEQ ID NO: 15852 - RNA, 38 nt, Artificial Sequence
  Description of Artificial Sequence:  Enzymatic Nucleic Acid
  misc_feature (31)..(31): n stands for inosine
ugugaucgcugaugaggccguuaggccgaanggugcca

SEQ ID NO: 15853 - RNA, 38 nt, Artificial Sequence
  Description of Artificial Sequence:  Enzymatic Nucleic Acid
  misc_feature (31)..(31): n stands for inosine
guuuccugcugaugaggccguuaggccgaanaucgugg

SEQ ID NO: 15854 - RNA, 38 nt, Artificial Sequence
  Description of Artificial Sequence:  Enzymatic Nucleic Acid
  misc_feature (31)..(31): n stands for inosine
agguuucccugaugaggccguuaggccgaanugaucgu

SEQ ID NO: 15855 - RNA, 38 nt, Artificial Sequence
  Description of Artificial Sequence:  Enzymatic Nucleic Acid
  misc_feature (31)..(31): n stands for inosine
auucuccacugaugaggccguuaggccgaanuuuccug

SEQ ID NO: 15856 - RNA, 38 nt, Artificial Sequence
  Description of Artificial Sequence:  Enzymatic Nucleic Acid
  misc_feature (31)..(31): n stands for inosine
gauucucccugaugaggccguuaggccgaanguuuccu

SEQ ID NO: 15857 - RNA, 38 nt, Artificial Sequence
  Description of Artificial Sequence:  Enzymatic Nucleic Acid
  misc_feature (31)..(31): n stands for inosine
uugucguccugaugaggccguuaggccgaanauucucc

SEQ ID NO: 15858 - RNA, 38 nt, Artificial Sequence
  Description of Artificial Sequence:  Enzymatic Nucleic Acid
  misc_feature (31)..(31): n stands for inosine
ccaauacucugaugaggccguuaggccgaanucgucug

SEQ ID NO: 15859 - RNA, 38 nt, Artificial Sequence
  Description of Artificial Sequence:  Enzymatic Nucleic Acid
  misc_feature (31)..(31): n stands for inosine
gacuucgacugaugaggccguuaggccgaancuuuccc

SEQ ID NO: 15860 - RNA, 38 nt, Artificial Sequence
  Description of Artificial Sequence:  Enzymatic Nucleic Acid
  misc_feature (31)..(31): n stands for inosine
cgugcaugcugaugaggccguuaggccgaanacuucga

SEQ ID NO: 15861 - RNA, 38 nt, Artificial Sequence
  Description of Artificial Sequence:  Enzymatic Nucleic Acid
  misc_feature (31)..(31): n stands for inosine
gccgugcacugaugaggccguuaggccgaanagacuuc

SEQ ID NO: 15862 - RNA, 38 nt, Artificial Sequence
  Description of Artificial Sequence:  Enzymatic Nucleic Acid
  misc_feature (31)..(31): n stands for inosine
agaugccgcugaugaggccguuaggccgaancaugaga

SEQ ID NO: 15863 - RNA, 38 nt, Artificial Sequence
  Description of Artificial Sequence:  Enzymatic Nucleic Acid
  misc_feature (31)..(31): n stands for inosine
uucccagacugaugaggccguuaggccgaanccgugca

SEQ ID NO: 15864 - RNA, 38 nt, Artificial Sequence
  Description of Artificial Sequence:  Enzymatic Nucleic Acid
  misc_feature (31)..(31): n stands for inosine
ggauuccccugaugaggccguuaggccgaanaugccgu

SEQ ID NO: 15865 - RNA, 38 nt, Artificial Sequence
  Description of Artificial Sequence:  Enzymatic Nucleic Acid
  misc_feature (31)..(31): n stands for inosine
guggagggcugaugaggccguuaggccgaanauuccca

SEQ ID NO: 15866 - RNA, 38 nt, Artificial Sequence
  Description of Artificial Sequence:  Enzymatic Nucleic Acid
  misc_feature (31)..(31): n stands for inosine
uguggaggcugaugaggccguuaggccgaangauuccc

SEQ ID NO: 15867 - RNA, 38 nt, Artificial Sequence
  Description of Artificial Sequence:  Enzymatic Nucleic Acid
  misc_feature (31)..(31): n stands for inosine
cuguggagcugaugaggccguuaggccgaanggauucc

SEQ ID NO: 15868 - RNA, 38 nt, Artificial Sequence
  Description of Artificial Sequence:  Enzymatic Nucleic Acid
  misc_feature (31)..(31): n stands for inosine
ucuguggacugaugaggccguuaggccgaangggauuc

SEQ ID NO: 15869 - RNA, 38 nt, Artificial Sequence
  Description of Artificial Sequence:  Enzymatic Nucleic Acid
  misc_feature (31)..(31): n stands for inosine
aucuguggcugaugaggccguuaggccgaanggggauu

SEQ ID NO: 15870 - RNA, 38 nt, Artificial Sequence
  Description of Artificial Sequence:  Enzymatic Nucleic Acid
  misc_feature (31)..(31): n stands for inosine
ugaucugucugaugaggccguuaggccgaanaggggga

SEQ ID NO: 15871 - RNA, 38 nt, Artificial Sequence
  Description of Artificial Sequence:  Enzymatic Nucleic Acid
  misc_feature (31)..(31): n stands for inosine
augaucugcugaugaggccguuaggccgaangaggggg

SEQ ID NO: 15872 - RNA, 38 nt, Artificial Sequence
  Description of Artificial Sequence:  Enzymatic Nucleic Acid
  misc_feature (31)..(31): n stands for inosine
acaugauccugaugaggccguuaggccgaanuggaggg

SEQ ID NO: 15873 - RNA, 38 nt, Artificial Sequence
  Description of Artificial Sequence:  Enzymatic Nucleic Acid
  misc_feature (31)..(31): n stands for inosine
aaaccacacugaugaggccguuaggccgaanaucugug

SEQ ID NO: 15874 - RNA, 38 nt, Artificial Sequence
  Description of Artificial Sequence:  Enzymatic Nucleic Acid
  misc_feature (31)..(31): n stands for inosine
ucuacaagcugaugaggccguuaggccgaanucucauu

SEQ ID NO: 15875 - RNA, 38 nt, Artificial Sequence
  Description of Artificial Sequence:  Enzymatic Nucleic Acid
  misc_feature (31)..(31): n stands for inosine
uucuacaacugaugaggccguuaggccgaangucucau

SEQ ID NO: 15876 - RNA, 38 nt, Artificial Sequence
  Description of Artificial Sequence:  Enzymatic Nucleic Acid
  misc_feature (31)..(31): n stands for inosine
cuucuacacugaugaggccguuaggccgaanggucuca

SEQ ID NO: 15877 - RNA, 38 nt, Artificial Sequence
  Description of Artificial Sequence:  Enzymatic Nucleic Acid
  misc_feature (31)..(31): n stands for inosine
aaugccugcugaugaggccguuaggccgaanucuucua

SEQ ID NO: 15878 - RNA, 38 nt, Artificial Sequence
  Description of Artificial Sequence:  Enzymatic Nucleic Acid
  misc_feature (31)..(31): n stands for inosine
acaaugcccugaugaggccguuaggccgaanagucuuc

SEQ ID NO: 15879 - RNA, 38 nt, Artificial Sequence
  Description of Artificial Sequence:  Enzymatic Nucleic Acid
  misc_feature (31)..(31): n stands for inosine
caauacaacugaugaggccguuaggccgaanccugagu

SEQ ID NO: 15880 - RNA, 38 nt, Artificial Sequence
  Description of Artificial Sequence:  Enzymatic Nucleic Acid
  misc_feature (31)..(31): n stands for inosine
gagguucccugaugaggccguuaggccgaanuucccau

SEQ ID NO: 15881 - RNA, 38 nt, Artificial Sequence
  Description of Artificial Sequence:  Enzymatic Nucleic Acid
  misc_feature (31)..(31): n stands for inosine
gauagugacugaugaggccguuaggccgaanuuccggu

SEQ ID NO: 15882 - RNA, 38 nt, Artificial Sequence
  Description of Artificial Sequence:  Enzymatic Nucleic Acid
  misc_feature (31)..(31): n stands for inosine
ggauagugcugaugaggccguuaggccgaanguuccgg

SEQ ID NO: 15883 - RNA, 38 nt, Artificial Sequence
  Description of Artificial Sequence:  Enzymatic Nucleic Acid
  misc_feature (31)..(31): n stands for inosine
gcggauagcugaugaggccguuaggccgaanagguucc

SEQ ID NO: 15884 - RNA, 38 nt, Artificial Sequence
  Description of Artificial Sequence:  Enzymatic Nucleic Acid
  misc_feature (31)..(31): n stands for inosine
cugcggaucugaugaggccguuaggccgaanugagguu

SEQ ID NO: 15885 - RNA, 38 nt, Artificial Sequence
  Description of Artificial Sequence:  Enzymatic Nucleic Acid
  misc_feature (31)..(31): n stands for inosine
cacucugccugaugaggccguuaggccgaanauaguga

SEQ ID NO: 15886 - RNA, 38 nt, Artificial Sequence
  Description of Artificial Sequence:  Enzymatic Nucleic Acid
  misc_feature (31)..(31): n stands for inosine
ccucacuccugaugaggccguuaggccgaancggauag

SEQ ID NO: 15887 - RNA, 38 nt, Artificial Sequence
  Description of Artificial Sequence:  Enzymatic Nucleic Acid
  misc_feature (31)..(31): n stands for inosine
gguguagacugaugaggccguuaggccgaanccuucgu

SEQ ID NO: 15888 - RNA, 38 nt, Artificial Sequence
  Description of Artificial Sequence:  Enzymatic Nucleic Acid
  misc_feature (31)..(31): n stands for inosine
agguguagcugaugaggccguuaggccgaangccuucg

SEQ ID NO: 15889 - RNA, 38 nt, Artificial Sequence
  Description of Artificial Sequence:  Enzymatic Nucleic Acid
  misc_feature (31)..(31): n stands for inosine
gcaggugucugaugaggccguuaggccgaanaggccuu

SEQ ID NO: 15890 - RNA, 38 nt, Artificial Sequence
  Description of Artificial Sequence:  Enzymatic Nucleic Acid
  misc_feature (31)..(31): n stands for inosine
cuggcaggcugaugaggccguuaggccgaanuagaggc

SEQ ID NO: 15891 - RNA, 38 nt, Artificial Sequence
  Description of Artificial Sequence:  Enzymatic Nucleic Acid
  misc_feature (31)..(31): n stands for inosine
gccuggcacugaugaggccguuaggccgaanuguagag

SEQ ID NO: 15892 - RNA, 38 nt, Artificial Sequence
  Description of Artificial Sequence:  Enzymatic Nucleic Acid
  misc_feature (31)..(31): n stands for inosine
ugccuggccugaugaggccguuaggccgaanguguaga

SEQ ID NO: 15893 - RNA, 38 nt, Artificial Sequence
  Description of Artificial Sequence:  Enzymatic Nucleic Acid
  misc_feature (31)..(31): n stands for inosine
gcaugccucugaugaggccguuaggccgaancaggugu

SEQ ID NO: 15894 - RNA, 38 nt, Artificial Sequence
  Description of Artificial Sequence:  Enzymatic Nucleic Acid
  misc_feature (31)..(31): n stands for inosine
ugcaugcccugaugaggccguuaggccgaangcaggug

SEQ ID NO: 15895 - RNA, 38 nt, Artificial Sequence
  Description of Artificial Sequence:  Enzymatic Nucleic Acid
  misc_feature (31)..(31): n stands for inosine
acacugcacugaugaggccguuaggccgaanccuggca

SEQ ID NO: 15896 - RNA, 38 nt, Artificial Sequence
  Description of Artificial Sequence:  Enzymatic Nucleic Acid
  misc_feature (31)..(31): n stands for inosine
aagaacaccugaugaggccguuaggccgaancaugccu

SEQ ID NO: 15897 - RNA, 38 nt, Artificial Sequence
  Description of Artificial Sequence:  Enzymatic Nucleic Acid
  misc_feature (31)..(31): n stands for inosine
cacagccacugaugaggccguuaggccgaanaacacug

SEQ ID NO: 15898 - RNA, 38 nt, Artificial Sequence
  Description of Artificial Sequence:  Enzymatic Nucleic Acid
  misc_feature (31)..(31): n stands for inosine
uuuugcaccugaugaggccguuaggccgaanccaagaa

SEQ ID NO: 15899 - RNA, 38 nt, Artificial Sequence
  Description of Artificial Sequence:  Enzymatic Nucleic Acid
  misc_feature (31)..(31): n stands for inosine
uccacuuucugaugaggccguuaggccgaancacagcc

SEQ ID NO: 15900 - RNA, 38 nt, Artificial Sequence
  Description of Artificial Sequence:  Enzymatic Nucleic Acid
  misc_feature (31)..(31): n stands for inosine
augaaaaacugaugaggccguuaggccgaanccuccac

SEQ ID NO: 15901 - RNA, 38 nt, Artificial Sequence
  Description of Artificial Sequence:  Enzymatic Nucleic Acid
  misc_feature (31)..(31): n stands for inosine
uucuauuacugaugaggccguuaggccgaanaaaaaug

SEQ ID NO: 15902 - RNA, 38 nt, Artificial Sequence
  Description of Artificial Sequence:  Enzymatic Nucleic Acid
  misc_feature (31)..(31): n stands for inosine
uuuuccugcugaugaggccguuaggccgaancaccuuc

SEQ ID NO: 15903 - RNA, 38 nt, Artificial Sequence
  Description of Artificial Sequence:  Enzymatic Nucleic Acid
  misc_feature (31)..(31): n stands for inosine
cuuuuccucugaugaggccguuaggccgaangcaccuu

SEQ ID NO: 15904 - RNA, 38 nt, Artificial Sequence
  Description of Artificial Sequence:  Enzymatic Nucleic Acid
  misc_feature (31)..(31): n stands for inosine
ucuuuucccugaugaggccguuaggccgaanggcaccu

SEQ ID NO: 15905 - RNA, 38 nt, Artificial Sequence
  Description of Artificial Sequence:  Enzymatic Nucleic Acid
  misc_feature (31)..(31): n stands for inosine
gauuuccacugaugaggccguuaggccgaanuucgucu

SEQ ID NO: 15906 - RNA, 38 nt, Artificial Sequence
  Description of Artificial Sequence:  Enzymatic Nucleic Acid
  misc_feature (31)..(31): n stands for inosine
uagaauaacugaugaggccguuaggccgaanauuucca

SEQ ID NO: 15907 - RNA, 38 nt, Artificial Sequence
  Description of Artificial Sequence:  Enzymatic Nucleic Acid
  misc_feature (31)..(31): n stands for inosine
ugccuacucugaugaggccguuaggccgaanaauaaug

SEQ ID NO: 15908 - RNA, 38 nt, Artificial Sequence
  Description of Artificial Sequence:  Enzymatic Nucleic Acid
  misc_feature (31)..(31): n stands for inosine
caccgucgcugaugaggccguuaggccgaanccuacua

SEQ ID NO: 15909 - RNA, 38 nt, Artificial Sequence
  Description of Artificial Sequence:  Enzymatic Nucleic Acid
  misc_feature (31)..(31): n stands for inosine
aagaacaucugaugaggccguuaggccgaancaaucac

SEQ ID NO: 15910 - RNA, 38 nt, Artificial Sequence
  Description of Artificial Sequence:  Enzymatic Nucleic Acid
  misc_feature (31)..(31): n stands for inosine
gaagaacacugaugaggccguuaggccgaangcaauca

SEQ ID NO: 15911 - RNA, 38 nt, Artificial Sequence
  Description of Artificial Sequence:  Enzymatic Nucleic Acid
  misc_feature (31)..(31): n stands for inosine
uagccagacugaugaggccguuaggccgaanaacaugg

SEQ ID NO: 15912 - RNA, 38 nt, Artificial Sequence
  Description of Artificial Sequence:  Enzymatic Nucleic Acid
  misc_feature (31)..(31): n stands for inosine
aaguagcccugaugaggccguuaggccgaanaagaaca

SEQ ID NO: 15913 - RNA, 38 nt, Artificial Sequence
  Description of Artificial Sequence:  Enzymatic Nucleic Acid
  misc_feature (31)..(31): n stands for inosine
caagaagucugaugaggccguuaggccgaanccagaag

SEQ ID NO: 15914 - RNA, 38 nt, Artificial Sequence
  Description of Artificial Sequence:  Enzymatic Nucleic Acid
  misc_feature (31)..(31): n stands for inosine
ugacaagacugaugaggccguuaggccgaanuagccag

SEQ ID NO: 15915 - RNA, 38 nt, Artificial Sequence
  Description of Artificial Sequence:  Enzymatic Nucleic Acid
  misc_feature (31)..(31): n stands for inosine
ugaugacacugaugaggccguuaggccgaanaaguagc

SEQ ID NO: 15916 - RNA, 38 nt, Artificial Sequence
  Description of Artificial Sequence:  Enzymatic Nucleic Acid
  misc_feature (31)..(31): n stands for inosine
uaggaugacugaugaggccguuaggccgaanacaagaa

SEQ ID NO: 15917 - RNA, 38 nt, Artificial Sequence
  Description of Artificial Sequence:  Enzymatic Nucleic Acid
  misc_feature (31)..(31): n stands for inosine
cccuaggacugaugaggccguuaggccgaanaugacaa

SEQ ID NO: 15918 - RNA, 38 nt, Artificial Sequence
  Description of Artificial Sequence:  Enzymatic Nucleic Acid
  misc_feature (31)..(31): n stands for inosine
ggucccuacugaugaggccguuaggccgaanaugauga

SEQ ID NO: 15919 - RNA, 38 nt, Artificial Sequence
  Description of Artificial Sequence:  Enzymatic Nucleic Acid
  misc_feature (31)..(31): n stands for inosine
cggucccucugaugaggccguuaggccgaangaugaug

SEQ ID NO: 15920 - RNA, 38 nt, Artificial Sequence
  Description of Artificial Sequence:  Enzymatic Nucleic Acid
  misc_feature (31)..(31): n stands for inosine
cgcuuaaccugaugaggccguuaggccgaanucccuag

SEQ ID NO: 15921 - RNA, 38 nt, Artificial Sequence
  Description of Artificial Sequence:  Enzymatic Nucleic Acid
  misc_feature (31)..(31): n stands for inosine
ccuccauucugaugaggccguuaggccgaancccgcuu

SEQ ID NO: 15922 - RNA, 38 nt, Artificial Sequence
  Description of Artificial Sequence:  Enzymatic Nucleic Acid
  misc_feature (31)..(31): n stands for inosine
cccuccaucugaugaggccguuaggccgaangcccgcu

SEQ ID NO: 15923 - RNA, 38 nt, Artificial Sequence
  Description of Artificial Sequence:  Enzymatic Nucleic Acid
  misc_feature (31)..(31): n stands for inosine
cugucuuccugaugaggccguuaggccgaanuuccccu

SEQ ID NO: 15924 - RNA, 38 nt, Artificial Sequence
  Description of Artificial Sequence:  Enzymatic Nucleic Acid
  misc_feature (31)..(31): n stands for inosine
aaguagcccugaugaggccguuaggccgaanucuucag

SEQ ID NO: 15925 - RNA, 38 nt, Artificial Sequence
  Description of Artificial Sequence:  Enzymatic Nucleic Acid
  misc_feature (31)..(31): n stands for inosine
ggacaagucugaugaggccguuaggccgaanccugucu

SEQ ID NO: 15926 - RNA, 38 nt, Artificial Sequence
  Description of Artificial Sequence:  Enzymatic Nucleic Acid
  misc_feature (31)..(31): n stands for inosine
gauggacacugaugaggccguuaggccgaanuagccug

SEQ ID NO: 15927 - RNA, 38 nt, Artificial Sequence
  Description of Artificial Sequence:  Enzymatic Nucleic Acid
  misc_feature (31)..(31): n stands for inosine
augacgaucugaugaggccguuaggccgaanacaagua

SEQ ID NO: 15928 - RNA, 38 nt, Artificial Sequence
  Description of Artificial Sequence:  Enzymatic Nucleic Acid
  misc_feature (31)..(31): n stands for inosine
caugacgacugaugaggccguuaggccgaangacaagu

SEQ ID NO: 15929 - RNA, 38 nt, Artificial Sequence
  Description of Artificial Sequence:  Enzymatic Nucleic Acid
  misc_feature (31)..(31): n stands for inosine
uggauccacugaugaggccguuaggccgaanacgaugg

SEQ ID NO: 15930 - RNA, 38 nt, Artificial Sequence
  Description of Artificial Sequence:  Enzymatic Nucleic Acid
  misc_feature (31)..(31): n stands for inosine
guucaucucugaugaggccguuaggccgaanauccaug

SEQ ID NO: 15931 - RNA, 38 nt, Artificial Sequence
  Description of Artificial Sequence:  Enzymatic Nucleic Acid
  misc_feature (31)..(31): n stands for inosine
aguucauccugaugaggccguuaggccgaangauccau

SEQ ID NO: 15932 - RNA, 38 nt, Artificial Sequence
  Description of Artificial Sequence:  Enzymatic Nucleic Acid
  misc_feature (31)..(31): n stands for inosine
ccaaugggcugaugaggccguuaggccgaanuucaucu

SEQ ID NO: 15933 - RNA, 38 nt, Artificial Sequence
  Description of Artificial Sequence:  Enzymatic Nucleic Acid
  misc_feature (31)..(31): n stands for inosine
auccaaugcugaugaggccguuaggccgaanaguucau

SEQ ID NO: 15934 - RNA, 38 nt, Artificial Sequence
  Description of Artificial Sequence:  Enzymatic Nucleic Acid
  misc_feature (31)..(31): n stands for inosine
cauccaaucugaugaggccguuaggccgaangaguuca

SEQ ID NO: 15935 - RNA, 38 nt, Artificial Sequence
  Description of Artificial Sequence:  Enzymatic Nucleic Acid
  misc_feature (31)..(31): n stands for inosine
ucauccaacugaugaggccguuaggccgaanggaguuc

SEQ ID NO: 15936 - RNA, 38 nt, Artificial Sequence
  Description of Artificial Sequence:  Enzymatic Nucleic Acid
  misc_feature (31)..(31): n stands for inosine
guucacaacugaugaggccguuaggccgaanuucaucc

SEQ ID NO: 15937 - RNA, 38 nt, Artificial Sequence
  Description of Artificial Sequence:  Enzymatic Nucleic Acid
  misc_feature (31)..(31): n stands for inosine
cauaaggccugaugaggccguuaggccgaanucguuca

SEQ ID NO: 15938 - RNA, 38 nt, Artificial Sequence
  Description of Artificial Sequence:  Enzymatic Nucleic Acid
  misc_feature (31)..(31): n stands for inosine
caucauaacugaugaggccguuaggccgaancagucgu

SEQ ID NO: 15939 - RNA, 38 nt, Artificial Sequence
  Description of Artificial Sequence:  Enzymatic Nucleic Acid
  misc_feature (31)..(31): n stands for inosine
gcaucauacugaugaggccguuaggccgaangcagucg

SEQ ID NO: 15940 - RNA, 38 nt, Artificial Sequence
  Description of Artificial Sequence:  Enzymatic Nucleic Acid
  misc_feature (31)..(31): n stands for inosine
cauuugcucugaugaggccguuaggccgaancaucaua

SEQ ID NO: 15941 - RNA, 38 nt, Artificial Sequence
  Description of Artificial Sequence:  Enzymatic Nucleic Acid
  misc_feature (31)..(31): n stands for inosine
ccauuugccugaugaggccguuaggccgaangcaucau

SEQ ID NO: 15942 - RNA, 38 nt, Artificial Sequence
  Description of Artificial Sequence:  Enzymatic Nucleic Acid
  misc_feature (31)..(31): n stands for inosine
uucccauucugaugaggccguuaggccgaancuggcau

SEQ ID NO: 15943 - RNA, 38 nt, Artificial Sequence
  Description of Artificial Sequence:  Enzymatic Nucleic Acid
  misc_feature (31)..(31): n stands for inosine
gucucuggcugaugaggccguuaggccgaanaauuccc

SEQ ID NO: 15944 - RNA, 38 nt, Artificial Sequence
  Description of Artificial Sequence:  Enzymatic Nucleic Acid
  misc_feature (31)..(31): n stands for inosine
ggucucugcugaugaggccguuaggccgaangaauucc

SEQ ID NO: 15945 - RNA, 38 nt, Artificial Sequence
  Description of Artificial Sequence:  Enzymatic Nucleic Acid
  misc_feature (31)..(31): n stands for inosine
cggucucucugaugaggccguuaggccgaanggaauuc

SEQ ID NO: 15946 - RNA, 38 nt, Artificial Sequence
  Description of Artificial Sequence:  Enzymatic Nucleic Acid
  misc_feature (31)..(31): n stands for inosine
ccggucuccugaugaggccguuaggccgaangggaauu

SEQ ID NO: 15947 - RNA, 38 nt, Artificial Sequence
  Description of Artificial Sequence:  Enzymatic Nucleic Acid
  misc_feature (31)..(31): n stands for inosine
guucagcccugaugaggccguuaggccgaanucucugg

SEQ ID NO: 15948 - RNA, 38 nt, Artificial Sequence
  Description of Artificial Sequence:  Enzymatic Nucleic Acid
  misc_feature (31)..(31): n stands for inosine
cuagguuccugaugaggccguuaggccgaanccggucu

SEQ ID NO: 15949 - RNA, 38 nt, Artificial Sequence
  Description of Artificial Sequence:  Enzymatic Nucleic Acid
  misc_feature (31)..(31): n stands for inosine
cuuaccuacugaugaggccguuaggccgaanuucagcc

SEQ ID NO: 15950 - RNA, 38 nt, Artificial Sequence
  Description of Artificial Sequence:  Enzymatic Nucleic Acid
  misc_feature (31)..(31): n stands for inosine
gcuuaccucugaugaggccguuaggccgaanguucagc

SEQ ID NO: 15951 - RNA, 38 nt, Artificial Sequence
  Description of Artificial Sequence:  Enzymatic Nucleic Acid
  misc_feature (31)..(31): n stands for inosine
ggccaagacugaugaggccguuaggccgaancuuaccu

SEQ ID NO: 15952 - RNA, 38 nt, Artificial Sequence
  Description of Artificial Sequence:  Enzymatic Nucleic Acid
  misc_feature (31)..(31): n stands for inosine
cggccaagcugaugaggccguuaggccgaangcuuacc

SEQ ID NO: 15953 - RNA, 38 nt, Artificial Sequence
  Description of Artificial Sequence:  Enzymatic Nucleic Acid
  misc_feature (31)..(31): n stands for inosine
cacggccacugaugaggccguuaggccgaanaggcuua

SEQ ID NO: 15954 - RNA, 38 nt, Artificial Sequence
  Description of Artificial Sequence:  Enzymatic Nucleic Acid
  misc_feature (31)..(31): n stands for inosine
ggcaccaccugaugaggccguuaggccgaanccaagag

SEQ ID NO: 15955 - RNA, 38 nt, Artificial Sequence
  Description of Artificial Sequence:  Enzymatic Nucleic Acid
  misc_feature (31)..(31): n stands for inosine
uggccaaacugaugaggccguuaggccgaancaccacg

SEQ ID NO: 15956 - RNA, 38 nt, Artificial Sequence
  Description of Artificial Sequence:  Enzymatic Nucleic Acid
  misc_feature (31)..(31): n stands for inosine
uuggccaacugaugaggccguuaggccgaangcaccac

SEQ ID NO: 15957 - RNA, 38 nt, Artificial Sequence
  Description of Artificial Sequence:  Enzymatic Nucleic Acid
  misc_feature (31)..(31): n stands for inosine
aaucucuucugaugaggccguuaggccgaanccaaagg

SEQ ID NO: 15958 - RNA, 38 nt, Artificial Sequence
  Description of Artificial Sequence:  Enzymatic Nucleic Acid
  misc_feature (31)..(31): n stands for inosine
caaucucucugaugaggccguuaggccgaangccaaag

SEQ ID NO: 15959 - RNA, 38 nt, Artificial Sequence
  Description of Artificial Sequence:  Enzymatic Nucleic Acid
  misc_feature (31)..(31): n stands for inosine
aaggcauccugaugaggccguuaggccgaancuucaau

SEQ ID NO: 15960 - RNA, 38 nt, Artificial Sequence
  Description of Artificial Sequence:  Enzymatic Nucleic Acid
  misc_feature (31)..(31): n stands for inosine
auuccaaacugaugaggccguuaggccgaancaucugc

SEQ ID NO: 15961 - RNA, 38 nt, Artificial Sequence
  Description of Artificial Sequence:  Enzymatic Nucleic Acid
  misc_feature (31)..(31): n stands for inosine
aauuccaacugaugaggccguuaggccgaangcaucug

SEQ ID NO: 15962 - RNA, 38 nt, Artificial Sequence
  Description of Artificial Sequence:  Enzymatic Nucleic Acid
  misc_feature (31)..(31): n stands for inosine
ugcugucucugaugaggccguuaggccgaanucaauuc

SEQ ID NO: 15963 - RNA, 38 nt, Artificial Sequence
  Description of Artificial Sequence:  Enzymatic Nucleic Acid
  misc_feature (31)..(31): n stands for inosine
caaguugccugaugaggccguuaggccgaanucuuguc

SEQ ID NO: 15964 - RNA, 38 nt, Artificial Sequence
  Description of Artificial Sequence:  Enzymatic Nucleic Acid
  misc_feature (31)..(31): n stands for inosine
cugcaagucugaugaggccguuaggccgaancugucuu

SEQ ID NO: 15965 - RNA, 38 nt, Artificial Sequence
  Description of Artificial Sequence:  Enzymatic Nucleic Acid
  misc_feature (31)..(31): n stands for inosine
guccugcacugaugaggccguuaggccgaanuugcugu

SEQ ID NO: 15966 - RNA, 38 nt, Artificial Sequence
  Description of Artificial Sequence:  Enzymatic Nucleic Acid
  misc_feature (31)..(31): n stands for inosine
uacugucccugaugaggccguuaggccgaancaaguug

SEQ ID NO: 15967 - RNA, 38 nt, Artificial Sequence
  Description of Artificial Sequence:  Enzymatic Nucleic Acid
  misc_feature (31)..(31): n stands for inosine
acugcuaccugaugaggccguuaggccgaanuccugca

SEQ ID NO: 15968 - RNA, 38 nt, Artificial Sequence
  Description of Artificial Sequence:  Enzymatic Nucleic Acid
  misc_feature (31)..(31): n stands for inosine
auuuugaccugaugaggccguuaggccgaancuacugu

SEQ ID NO: 15969 - RNA, 38 nt, Artificial Sequence
  Description of Artificial Sequence:  Enzymatic Nucleic Acid
  misc_feature (31)..(31): n stands for inosine
caacauuucugaugaggccguuaggccgaanacugcua

SEQ ID NO: 15970 - RNA, 38 nt, Artificial Sequence
  Description of Artificial Sequence:  Enzymatic Nucleic Acid
  misc_feature (31)..(31): n stands for inosine
cugugugucugaugaggccguuaggccgaancuccuuc

SEQ ID NO: 15971 - RNA, 38 nt, Artificial Sequence
  Description of Artificial Sequence:  Enzymatic Nucleic Acid
  misc_feature (31)..(31): n stands for inosine
ucacugugcugaugaggccguuaggccgaanuugcucc

SEQ ID NO: 15972 - RNA, 38 nt, Artificial Sequence
  Description of Artificial Sequence:  Enzymatic Nucleic Acid
  misc_feature (31)..(31): n stands for inosine
gcucacugcugaugaggccguuaggccgaanuguugcu

SEQ ID NO: 15973 - RNA, 38 nt, Artificial Sequence
  Description of Artificial Sequence:  Enzymatic Nucleic Acid
  misc_feature (31)..(31): n stands for inosine
augcucaccugaugaggccguuaggccgaanuguguug

SEQ ID NO: 15974 - RNA, 38 nt, Artificial Sequence
  Description of Artificial Sequence:  Enzymatic Nucleic Acid
  misc_feature (31)..(31): n stands for inosine
gagcucgacugaugaggccguuaggccgaancucacug

SEQ ID NO: 15975 - RNA, 38 nt, Artificial Sequence
  Description of Artificial Sequence:  Enzymatic Nucleic Acid
  misc_feature (31)..(31): n stands for inosine
gacaugagcugaugaggccguuaggccgaancucgaug

SEQ ID NO: 15976 - RNA, 38 nt, Artificial Sequence
  Description of Artificial Sequence:  Enzymatic Nucleic Acid
  misc_feature (31)..(31): n stands for inosine
cagacaugcugaugaggccguuaggccgaanagcucga

SEQ ID NO: 15977 - RNA, 38 nt, Artificial Sequence
  Description of Artificial Sequence:  Enzymatic Nucleic Acid
  misc_feature (31)..(31): n stands for inosine
uucagacacugaugaggccguuaggccgaanagagcuc

SEQ ID NO: 15978 - RNA, 38 nt, Artificial Sequence
  Description of Artificial Sequence:  Enzymatic Nucleic Acid
  misc_feature (31)..(31): n stands for inosine
uugaguuccugaugaggccguuaggccgaanacaugag

SEQ ID NO: 15979 - RNA, 38 nt, Artificial Sequence
  Description of Artificial Sequence:  Enzymatic Nucleic Acid
  misc_feature (31)..(31): n stands for inosine
ggaucuugcugaugaggccguuaggccgaanuucagac

SEQ ID NO: 15980 - RNA, 38 nt, Artificial Sequence
  Description of Artificial Sequence:  Enzymatic Nucleic Acid
  misc_feature (31)..(31): n stands for inosine
gaggaucucugaugaggccguuaggccgaanaguucag

SEQ ID NO: 15981 - RNA, 38 nt, Artificial Sequence
  Description of Artificial Sequence:  Enzymatic Nucleic Acid
  misc_feature (31)..(31): n stands for inosine
augaaugacugaugaggccguuaggccgaanaucuuga

SEQ ID NO: 15982 - RNA, 38 nt, Artificial Sequence
  Description of Artificial Sequence:  Enzymatic Nucleic Acid
  misc_feature (31)..(31): n stands for inosine
uaugaaugcugaugaggccguuaggccgaangaucuug

SEQ ID NO: 15983 - RNA, 38 nt, Artificial Sequence
  Description of Artificial Sequence:  Enzymatic Nucleic Acid
  misc_feature (31)..(31): n stands for inosine
aauaugaacugaugaggccguuaggccgaanaggaucu

SEQ ID NO: 15984 - RNA, 38 nt, Artificial Sequence
  Description of Artificial Sequence:  Enzymatic Nucleic Acid
  misc_feature (31)..(31): n stands for inosine
gaccaauacugaugaggccguuaggccgaanaaugagg

SEQ ID NO: 15985 - RNA, 38 nt, Artificial Sequence
  Description of Artificial Sequence:  Enzymatic Nucleic Acid
  misc_feature (31)..(31): n stands for inosine
ugagauggcugaugaggccguuaggccgaanaccaaua

SEQ ID NO: 15986 - RNA, 38 nt, Artificial Sequence
  Description of Artificial Sequence:  Enzymatic Nucleic Acid
  misc_feature (31)..(31): n stands for inosine
auugagaucugaugaggccguuaggccgaanugaccaa

SEQ ID NO: 15987 - RNA, 38 nt, Artificial Sequence
  Description of Artificial Sequence:  Enzymatic Nucleic Acid
  misc_feature (31)..(31): n stands for inosine
cauugagacugaugaggccguuaggccgaangugacca

SEQ ID NO: 15988 - RNA, 38 nt, Artificial Sequence
  Description of Artificial Sequence:  Enzymatic Nucleic Acid
  misc_feature (31)..(31): n stands for inosine
ccacauugcugaugaggccguuaggccgaanaugguga

SEQ ID NO: 15989 - RNA, 38 nt, Artificial Sequence
  Description of Artificial Sequence:  Enzymatic Nucleic Acid
  misc_feature (31)..(31): n stands for inosine
gaccacaucugaugaggccguuaggccgaanagauggu

SEQ ID NO: 15990 - RNA, 38 nt, Artificial Sequence
  Description of Artificial Sequence:  Enzymatic Nucleic Acid
  misc_feature (31)..(31): n stands for inosine
uagaaggucugaugaggccguuaggccgaanaccacau

SEQ ID NO: 15991 - RNA, 38 nt, Artificial Sequence
  Description of Artificial Sequence:  Enzymatic Nucleic Acid
  misc_feature (31)..(31): n stands for inosine
accuagaacugaugaggccguuaggccgaanuugacca

SEQ ID NO: 15992 - RNA, 38 nt, Artificial Sequence
  Description of Artificial Sequence:  Enzymatic Nucleic Acid
  misc_feature (31)..(31): n stands for inosine
caccuagacugaugaggccguuaggccgaanguugacc

SEQ ID NO: 15993 - RNA, 38 nt, Artificial Sequence
  Description of Artificial Sequence:  Enzymatic Nucleic Acid
  misc_feature (31)..(31): n stands for inosine
aggcaccucugaugaggccguuaggccgaanaagguug

SEQ ID NO: 15994 - RNA, 38 nt, Artificial Sequence
  Description of Artificial Sequence:  Enzymatic Nucleic Acid
  misc_feature (31)..(31): n stands for inosine
uugguacacugaugaggccguuaggccgaancaccuag

SEQ ID NO: 15995 - RNA, 38 nt, Artificial Sequence
  Description of Artificial Sequence:  Enzymatic Nucleic Acid
  misc_feature (31)..(31): n stands for inosine
cuugguaccugaugaggccguuaggccgaangcaccua

SEQ ID NO: 15996 - RNA, 38 nt, Artificial Sequence
  Description of Artificial Sequence:  Enzymatic Nucleic Acid
  misc_feature (31)..(31): n stands for inosine
ccuggcuucugaugaggccguuaggccgaanuacaggc

SEQ ID NO: 15997 - RNA, 38 nt, Artificial Sequence
  Description of Artificial Sequence:  Enzymatic Nucleic Acid
  misc_feature (31)..(31): n stands for inosine
uccuggcucugaugaggccguuaggccgaanguacagg

SEQ ID NO: 15998 - RNA, 38 nt, Artificial Sequence
  Description of Artificial Sequence:  Enzymatic Nucleic Acid
  misc_feature (31)..(31): n stands for inosine
gcccuccucugaugaggccguuaggccgaancuuggua

SEQ ID NO: 15999 - RNA, 38 nt, Artificial Sequence
  Description of Artificial Sequence:  Enzymatic Nucleic Acid
  misc_feature (31)..(31): n stands for inosine
ggcccucccugaugaggccguuaggccgaangcuuggu

SEQ ID NO: 16000 - RNA, 38 nt, Artificial Sequence
  Description of Artificial Sequence:  Enzymatic Nucleic Acid
  misc_feature (31)..(31): n stands for inosine
ccaugagucugaugaggccguuaggccgaancccuccu

SEQ ID NO: 16001 - RNA, 38 nt, Artificial Sequence
  Description of Artificial Sequence:  Enzymatic Nucleic Acid
  misc_feature (31)..(31): n stands for inosine
accaugagcugaugaggccguuaggccgaangcccucc

SEQ ID NO: 16002 - RNA, 38 nt, Artificial Sequence
  Description of Artificial Sequence:  Enzymatic Nucleic Acid
  misc_feature (31)..(31): n stands for inosine
ucaccaugcugaugaggccguuaggccgaanuggcccu

SEQ ID NO: 16003 - RNA, 38 nt, Artificial Sequence
  Description of Artificial Sequence:  Enzymatic Nucleic Acid
  misc_feature (31)..(31): n stands for inosine
aaucaccacugaugaggccguuaggccgaanaguggcc

SEQ ID NO: 16004 - RNA, 38 nt, Artificial Sequence
  Description of Artificial Sequence:  Enzymatic Nucleic Acid
  misc_feature (31)..(31): n stands for inosine
aaauuugccugaugaggccguuaggccgaanaauucca

SEQ ID NO: 16005 - RNA, 38 nt, Artificial Sequence
  Description of Artificial Sequence:  Enzymatic Nucleic Acid
  misc_feature (31)..(31): n stands for inosine
uccaaauucugaugaggccguuaggccgaancagaauu

SEQ ID NO: 16006 - RNA, 38 nt, Artificial Sequence
  Description of Artificial Sequence:  Enzymatic Nucleic Acid
  misc_feature (31)..(31): n stands for inosine
aguggacacugaugaggccguuaggccgaanuuuccaa

SEQ ID NO: 16007 - RNA, 38 nt, Artificial Sequence
  Description of Artificial Sequence:  Enzymatic Nucleic Acid
  misc_feature (31)..(31): n stands for inosine
aaguggaccugaugaggccguuaggccgaanguuucca

SEQ ID NO: 16008 - RNA, 38 nt, Artificial Sequence
  Description of Artificial Sequence:  Enzymatic Nucleic Acid
  misc_feature (31)..(31): n stands for inosine
agguaagucugaugaggccguuaggccgaanacagguu

SEQ ID NO: 16009 - RNA, 38 nt, Artificial Sequence
  Description of Artificial Sequence:  Enzymatic Nucleic Acid
  misc_feature (31)..(31): n stands for inosine
cagguaagcugaugaggccguuaggccgaangacaggu

SEQ ID NO: 16010 - RNA, 38 nt, Artificial Sequence
  Description of Artificial Sequence:  Enzymatic Nucleic Acid
  misc_feature (31)..(31): n stands for inosine
cucagguacugaugaggccguuaggccgaanuggacag

SEQ ID NO: 16011 - RNA, 38 nt, Artificial Sequence
  Description of Artificial Sequence:  Enzymatic Nucleic Acid
  misc_feature (31)..(31): n stands for inosine
gcuccucacugaugaggccguuaggccgaanuaagugg

SEQ ID NO: 16012 - RNA, 38 nt, Artificial Sequence
  Description of Artificial Sequence:  Enzymatic Nucleic Acid
  misc_feature (31)..(31): n stands for inosine
ugcuccuccugaugaggccguuaggccgaanguaagug

SEQ ID NO: 16013 - RNA, 38 nt, Artificial Sequence
  Description of Artificial Sequence:  Enzymatic Nucleic Acid
  misc_feature (31)..(31): n stands for inosine
auuucucucugaugaggccguuaggccgaancuccuca

SEQ ID NO: 16014 - RNA, 38 nt, Artificial Sequence
  Description of Artificial Sequence:  Enzymatic Nucleic Acid
  misc_feature (31)..(31): n stands for inosine
cuuguaggcugaugaggccguuaggccgaanacaaauu

SEQ ID NO: 16015 - RNA, 38 nt, Artificial Sequence
  Description of Artificial Sequence:  Enzymatic Nucleic Acid
  misc_feature (31)..(31): n stands for inosine
ucuuguagcugaugaggccguuaggccgaangacaaau

SEQ ID NO: 16016 - RNA, 38 nt, Artificial Sequence
  Description of Artificial Sequence:  Enzymatic Nucleic Acid
  misc_feature (31)..(31): n stands for inosine
gucuuguacugaugaggccguuaggccgaanggacaaa

SEQ ID NO: 16017 - RNA, 38 nt, Artificial Sequence
  Description of Artificial Sequence:  Enzymatic Nucleic Acid
  misc_feature (31)..(31): n stands for inosine
ggucuugucugaugaggccguuaggccgaangggacaa

SEQ ID NO: 16018 - RNA, 38 nt, Artificial Sequence
  Description of Artificial Sequence:  Enzymatic Nucleic Acid
  misc_feature (31)..(31): n stands for inosine
uuuggucucugaugaggccguuaggccgaanuagggga

SEQ ID NO: 16019 - RNA, 38 nt, Artificial Sequence
  Description of Artificial Sequence:  Enzymatic Nucleic Acid
  misc_feature (31)..(31): n stands for inosine
gccccuuucugaugaggccguuaggccgaanucuugua

SEQ ID NO: 16020 - RNA, 38 nt, Artificial Sequence
  Description of Artificial Sequence:  Enzymatic Nucleic Acid
  misc_feature (31)..(31): n stands for inosine
ugccccuucugaugaggccguuaggccgaangucuugu

SEQ ID NO: 16021 - RNA, 38 nt, Artificial Sequence
  Description of Artificial Sequence:  Enzymatic Nucleic Acid
  misc_feature (31)..(31): n stands for inosine
cggaaucgcugaugaggccguuaggccgaanccccuuu

SEQ ID NO: 16022 - RNA, 38 nt, Artificial Sequence
  Description of Artificial Sequence:  Enzymatic Nucleic Acid
  misc_feature (31)..(31): n stands for inosine
cccuugaccugaugaggccguuaggccgaanaaucgug

SEQ ID NO: 16023 - RNA, 38 nt, Artificial Sequence
  Description of Artificial Sequence:  Enzymatic Nucleic Acid
  misc_feature (31)..(31): n stands for inosine
cuuucccucugaugaggccguuaggccgaanacggaau

SEQ ID NO: 16024 - RNA, 38 nt, Artificial Sequence
  Description of Artificial Sequence:  Enzymatic Nucleic Acid
  misc_feature (31)..(31): n stands for inosine
uccaacgucugaugaggccguuaggccgaanucuuucc

SEQ ID NO: 16025 - RNA, 38 nt, Artificial Sequence
  Description of Artificial Sequence:  Enzymatic Nucleic Acid
  misc_feature (31)..(31): n stands for inosine
acagggaucugaugaggccguuaggccgaancuccaac

SEQ ID NO: 16026 - RNA, 38 nt, Artificial Sequence
  Description of Artificial Sequence:  Enzymatic Nucleic Acid
  misc_feature (31)..(31): n stands for inosine
auccacagcugaugaggccguuaggccgaanauugcuc

SEQ ID NO: 16027 - RNA, 38 nt, Artificial Sequence
  Description of Artificial Sequence:  Enzymatic Nucleic Acid
  misc_feature (31)..(31): n stands for inosine
gauccacacugaugaggccguuaggccgaangauugcu

SEQ ID NO: 16028 - RNA, 38 nt, Artificial Sequence
  Description of Artificial Sequence:  Enzymatic Nucleic Acid
  misc_feature (31)..(31): n stands for inosine
agauccaccugaugaggccguuaggccgaanggauugc

SEQ ID NO: 16029 - RNA, 38 nt, Artificial Sequence
  Description of Artificial Sequence:  Enzymatic Nucleic Acid
  misc_feature (31)..(31): n stands for inosine
gccguuuccugaugaggccguuaggccgaanauccaca

SEQ ID NO: 16030 - RNA, 38 nt, Artificial Sequence
  Description of Artificial Sequence:  Enzymatic Nucleic Acid
  misc_feature (31)..(31): n stands for inosine
gcuguccacugaugaggccguuaggccgaancgccguu

SEQ ID NO: 16031 - RNA, 38 nt, Artificial Sequence
  Description of Artificial Sequence:  Enzymatic Nucleic Acid
  misc_feature (31)..(31): n stands for inosine
ggugaugccugaugaggccguuaggccgaanuccaagc

SEQ ID NO: 16032 - RNA, 38 nt, Artificial Sequence
  Description of Artificial Sequence:  Enzymatic Nucleic Acid
  misc_feature (31)..(31): n stands for inosine
acuggugacugaugaggccguuaggccgaancugucca

SEQ ID NO: 16033 - RNA, 38 nt, Artificial Sequence
  Description of Artificial Sequence:  Enzymatic Nucleic Acid
  misc_feature (31)..(31): n stands for inosine
gcuacuggcugaugaggccguuaggccgaanaugcugu

SEQ ID NO: 16034 - RNA, 38 nt, Artificial Sequence
  Description of Artificial Sequence:  Enzymatic Nucleic Acid
  misc_feature (31)..(31): n stands for inosine
uggcuacucugaugaggccguuaggccgaanugaugcu

SEQ ID NO: 16035 - RNA, 38 nt, Artificial Sequence
  Description of Artificial Sequence:  Enzymatic Nucleic Acid
  misc_feature (31)..(31): n stands for inosine
cuggcuaccugaugaggccguuaggccgaangugaugc

SEQ ID NO: 16036 - RNA, 38 nt, Artificial Sequence
  Description of Artificial Sequence:  Enzymatic Nucleic Acid
  misc_feature (31)..(31): n stands for inosine
ugagcucucugaugaggccguuaggccgaancuacugg

SEQ ID NO: 16037 - RNA, 38 nt, Artificial Sequence
  Description of Artificial Sequence:  Enzymatic Nucleic Acid
  misc_feature (31)..(31): n stands for inosine
cugagcuccugaugaggccguuaggccgaangcuacug

SEQ ID NO: 16038 - RNA, 38 nt, Artificial Sequence
  Description of Artificial Sequence:  Enzymatic Nucleic Acid
  misc_feature (31)..(31): n stands for inosine
gcuggcugcugaugaggccguuaggccgaancucuggc

SEQ ID NO: 16039 - RNA, 38 nt, Artificial Sequence
  Description of Artificial Sequence:  Enzymatic Nucleic Acid
  misc_feature (31)..(31): n stands for inosine
gagcuggccugaugaggccguuaggccgaanagcucug

SEQ ID NO: 16040 - RNA, 38 nt, Artificial Sequence
  Description of Artificial Sequence:  Enzymatic Nucleic Acid
  misc_feature (31)..(31): n stands for inosine
ccagagcucugaugaggccguuaggccgaancugagcu

SEQ ID NO: 16041 - RNA, 38 nt, Artificial Sequence
  Description of Artificial Sequence:  Enzymatic Nucleic Acid
  misc_feature (31)..(31): n stands for inosine
uccagagccugaugaggccguuaggccgaangcugagc

SEQ ID NO: 16042 - RNA, 38 nt, Artificial Sequence
  Description of Artificial Sequence:  Enzymatic Nucleic Acid
  misc_feature (31)..(31): n stands for inosine
aaauccagcugaugaggccguuaggccgaancuggcug

SEQ ID NO: 16043 - RNA, 38 nt, Artificial Sequence
  Description of Artificial Sequence:  Enzymatic Nucleic Acid
  misc_feature (31)..(31): n stands for inosine
acaaaucccugaugaggccguuaggccgaanagcuggc

SEQ ID NO: 16044 - RNA, 38 nt, Artificial Sequence
  Description of Artificial Sequence:  Enzymatic Nucleic Acid
  misc_feature (31)..(31): n stands for inosine
ucacugagcugaugaggccguuaggccgaanacuucuc

SEQ ID NO: 16045 - RNA, 38 nt, Artificial Sequence
  Description of Artificial Sequence:  Enzymatic Nucleic Acid
  misc_feature (31)..(31): n stands for inosine
aucacugacugaugaggccguuaggccgaangacuucu

SEQ ID NO: 16046 - RNA, 38 nt, Artificial Sequence
  Description of Artificial Sequence:  Enzymatic Nucleic Acid
  misc_feature (31)..(31): n stands for inosine
caucacugcugaugaggccguuaggccgaanggacuuc

SEQ ID NO: 16047 - RNA, 38 nt, Artificial Sequence
  Description of Artificial Sequence:  Enzymatic Nucleic Acid
  misc_feature (31)..(31): n stands for inosine
uacaucaccugaugaggccguuaggccgaanagggacu

SEQ ID NO: 16048 - RNA, 38 nt, Artificial Sequence
  Description of Artificial Sequence:  Enzymatic Nucleic Acid
  misc_feature (31)..(31): n stands for inosine
ucuucaggcugaugaggccguuaggccgaancuuccuc

SEQ ID NO: 16049 - RNA, 38 nt, Artificial Sequence
  Description of Artificial Sequence:  Enzymatic Nucleic Acid
  misc_feature (31)..(31): n stands for inosine
gaucuucacugaugaggccguuaggccgaanagcuucc

SEQ ID NO: 16050 - RNA, 38 nt, Artificial Sequence
  Description of Artificial Sequence:  Enzymatic Nucleic Acid
  misc_feature (31)..(31): n stands for inosine
agaucuuccugaugaggccguuaggccgaangagcuuc

SEQ ID NO: 16051 - RNA, 38 nt, Artificial Sequence
  Description of Artificial Sequence:  Enzymatic Nucleic Acid
  misc_feature (31)..(31): n stands for inosine
ccuuauaccugaugaggccguuaggccgaanaucuuca

SEQ ID NO: 16052 - RNA, 38 nt, Artificial Sequence
  Description of Artificial Sequence:  Enzymatic Nucleic Acid
  misc_feature (31)..(31): n stands for inosine
ggucaggacugaugaggccguuaggccgaanuccuuau

SEQ ID NO: 16053 - RNA, 38 nt, Artificial Sequence
  Description of Artificial Sequence:  Enzymatic Nucleic Acid
  misc_feature (31)..(31): n stands for inosine
caaggucacugaugaggccguuaggccgaanaaguccu

SEQ ID NO: 16054 - RNA, 38 nt, Artificial Sequence
  Description of Artificial Sequence:  Enzymatic Nucleic Acid
  misc_feature (31)..(31): n stands for inosine
ccaagguccugaugaggccguuaggccgaangaagucc

SEQ ID NO: 16055 - RNA, 38 nt, Artificial Sequence
  Description of Artificial Sequence:  Enzymatic Nucleic Acid
  misc_feature (31)..(31): n stands for inosine
ugcuccaacugaugaggccguuaggccgaanucaggaa

SEQ ID NO: 16056 - RNA, 38 nt, Artificial Sequence
  Description of Artificial Sequence:  Enzymatic Nucleic Acid
  misc_feature (31)..(31): n stands for inosine
augcuccacugaugaggccguuaggccgaangucagga

SEQ ID NO: 16057 - RNA, 38 nt, Artificial Sequence
  Description of Artificial Sequence:  Enzymatic Nucleic Acid
  misc_feature (31)..(31): n stands for inosine
agaugagacugaugaggccguuaggccgaancuccaag

SEQ ID NO: 16058 - RNA, 38 nt, Artificial Sequence
  Description of Artificial Sequence:  Enzymatic Nucleic Acid
  misc_feature (31)..(31): n stands for inosine
aacagaugcugaugaggccguuaggccgaanaugcucc

SEQ ID NO: 16059 - RNA, 38 nt, Artificial Sequence
  Description of Artificial Sequence:  Enzymatic Nucleic Acid
  misc_feature (31)..(31): n stands for inosine
guaacagacugaugaggccguuaggccgaanagaugcu

SEQ ID NO: 16060 - RNA, 38 nt, Artificial Sequence
  Description of Artificial Sequence:  Enzymatic Nucleic Acid
  misc_feature (31)..(31): n stands for inosine
gcuguaaccugaugaggccguuaggccgaanaugagau

SEQ ID NO: 16061 - RNA, 38 nt, Artificial Sequence
  Description of Artificial Sequence:  Enzymatic Nucleic Acid
  misc_feature (31)..(31): n stands for inosine
uuggaagccugaugaggccguuaggccgaanuaacaga

SEQ ID NO: 16062 - RNA, 38 nt, Artificial Sequence
  Description of Artificial Sequence:  Enzymatic Nucleic Acid
  misc_feature (31)..(31): n stands for inosine
cacuuggacugaugaggccguuaggccgaancuguaac

SEQ ID NO: 16063 - RNA, 38 nt, Artificial Sequence
  Description of Artificial Sequence:  Enzymatic Nucleic Acid
  misc_feature (31)..(31): n stands for inosine
agccacuucugaugaggccguuaggccgaanaagcugu

SEQ ID NO: 16064 - RNA, 38 nt, Artificial Sequence
  Description of Artificial Sequence:  Enzymatic Nucleic Acid
  misc_feature (31)..(31): n stands for inosine
uagccacucugaugaggccguuaggccgaangaagcug

SEQ ID NO: 16065 - RNA, 38 nt, Artificial Sequence
  Description of Artificial Sequence:  Enzymatic Nucleic Acid
  misc_feature (31)..(31): n stands for inosine
augcccuucugaugaggccguuaggccgaanccacuug

SEQ ID NO: 16066 - RNA, 38 nt, Artificial Sequence
  Description of Artificial Sequence:  Enzymatic Nucleic Acid
  misc_feature (31)..(31): n stands for inosine
gaacuccacugaugaggccguuaggccgaancccuuag

SEQ ID NO: 16067 - RNA, 38 nt, Artificial Sequence
  Description of Artificial Sequence:  Enzymatic Nucleic Acid
  misc_feature (31)..(31): n stands for inosine
cgaugccacugaugaggccguuaggccgaanaacucca

SEQ ID NO: 16068 - RNA, 38 nt, Artificial Sequence
  Description of Artificial Sequence:  Enzymatic Nucleic Acid
  misc_feature (31)..(31): n stands for inosine
uuucgcgacugaugaggccguuaggccgaanccaagaa

SEQ ID NO: 16069 - RNA, 38 nt, Artificial Sequence
  Description of Artificial Sequence:  Enzymatic Nucleic Acid
  misc_feature (31)..(31): n stands for inosine
gucccugucugaugaggccguuaggccgaanauacacu

SEQ ID NO: 16070 - RNA, 38 nt, Artificial Sequence
  Description of Artificial Sequence:  Enzymatic Nucleic Acid
  misc_feature (31)..(31): n stands for inosine
ggucccugcugaugaggccguuaggccgaangauacac

SEQ ID NO: 16071 - RNA, 38 nt, Artificial Sequence
  Description of Artificial Sequence:  Enzymatic Nucleic Acid
  misc_feature (31)..(31): n stands for inosine
cagguccccugaugaggccguuaggccgaanuggauac

SEQ ID NO: 16072 - RNA, 38 nt, Artificial Sequence
  Description of Artificial Sequence:  Enzymatic Nucleic Acid
  misc_feature (31)..(31): n stands for inosine
ugccgccacugaugaggccguuaggccgaanucccugu

SEQ ID NO: 16073 - RNA, 38 nt, Artificial Sequence
  Description of Artificial Sequence:  Enzymatic Nucleic Acid
  misc_feature (31)..(31): n stands for inosine
gugccgcccugaugaggccguuaggccgaangucccug

SEQ ID NO: 16074 - RNA, 38 nt, Artificial Sequence
  Description of Artificial Sequence:  Enzymatic Nucleic Acid
  misc_feature (31)..(31): n stands for inosine
auauuucgcugaugaggccguuaggccgaanccgccag

SEQ ID NO: 16075 - RNA, 38 nt, Artificial Sequence
  Description of Artificial Sequence:  Enzymatic Nucleic Acid
  misc_feature (31)..(31): n stands for inosine
cgauaagacugaugaggccguuaggccgaanauauuuc

SEQ ID NO: 16076 - RNA, 38 nt, Artificial Sequence
  Description of Artificial Sequence:  Enzymatic Nucleic Acid
  misc_feature (31)..(31): n stands for inosine
ccgauaagcugaugaggccguuaggccgaangauauuu

SEQ ID NO: 16077 - RNA, 38 nt, Artificial Sequence
  Description of Artificial Sequence:  Enzymatic Nucleic Acid
  misc_feature (31)..(31): n stands for inosine
cuccgauacugaugaggccguuaggccgaanaggauau

SEQ ID NO: 16078 - RNA, 38 nt, Artificial Sequence
  Description of Artificial Sequence:  Enzymatic Nucleic Acid
  misc_feature (31)..(31): n stands for inosine
aaagucaccugaugaggccguuaggccgaanauuuuaa

SEQ ID NO: 16079 - RNA, 38 nt, Artificial Sequence
  Description of Artificial Sequence:  Enzymatic Nucleic Acid
  misc_feature (31)..(31): n stands for inosine
caagccaacugaugaggccguuaggccgaanucacaga

SEQ ID NO: 16080 - RNA, 38 nt, Artificial Sequence
  Description of Artificial Sequence:  Enzymatic Nucleic Acid
  misc_feature (31)..(31): n stands for inosine
ccgggccacugaugaggccguuaggccgaanccaaagu

SEQ ID NO: 16081 - RNA, 38 nt, Artificial Sequence
  Description of Artificial Sequence:  Enzymatic Nucleic Acid
  misc_feature (31)..(31): n stands for inosine
auaucccgcugaugaggccguuaggccgaanccaagcc

SEQ ID NO: 16082 - RNA, 38 nt, Artificial Sequence
  Description of Artificial Sequence:  Enzymatic Nucleic Acid
  misc_feature (31)..(31): n stands for inosine
aauauccccugaugaggccguuaggccgaangccaagc

SEQ ID NO: 16083 - RNA, 38 nt, Artificial Sequence
  Description of Artificial Sequence:  Enzymatic Nucleic Acid
  misc_feature (31)..(31): n stands for inosine
cauaaucucugaugaggccguuaggccgaanaucuuua

SEQ ID NO: 16084 - RNA, 38 nt, Artificial Sequence
  Description of Artificial Sequence:  Enzymatic Nucleic Acid
  misc_feature (31)..(31): n stands for inosine
acauaauccugaugaggccguuaggccgaangaucuuu

SEQ ID NO: 16085 - RNA, 38 nt, Artificial Sequence
  Description of Artificial Sequence:  Enzymatic Nucleic Acid
  misc_feature (31)..(31): n stands for inosine
uccuuuuccugaugaggccguuaggccgaanacauaau

SEQ ID NO: 16086 - RNA, 38 nt, Artificial Sequence
  Description of Artificial Sequence:  Enzymatic Nucleic Acid
  misc_feature (31)..(31): n stands for inosine
gggaggcgcugaugaggccguuaggccgaancaucucc

SEQ ID NO: 16087 - RNA, 38 nt, Artificial Sequence
  Description of Artificial Sequence:  Enzymatic Nucleic Acid
  misc_feature (31)..(31): n stands for inosine
caaagggacugaugaggccguuaggccgaancgagcau

SEQ ID NO: 16088 - RNA, 38 nt, Artificial Sequence
  Description of Artificial Sequence:  Enzymatic Nucleic Acid
  misc_feature (31)..(31): n stands for inosine
ucaaagggcugaugaggccguuaggccgaangcgagca

SEQ ID NO: 16089 - RNA, 38 nt, Artificial Sequence
  Description of Artificial Sequence:  Enzymatic Nucleic Acid
  misc_feature (31)..(31): n stands for inosine
uuucaaagcugaugaggccguuaggccgaanaggcgag

SEQ ID NO: 16090 - RNA, 38 nt, Artificial Sequence
  Description of Artificial Sequence:  Enzymatic Nucleic Acid
  misc_feature (31)..(31): n stands for inosine
auuucaaacugaugaggccguuaggccgaangaggcga

SEQ ID NO: 16091 - RNA, 38 nt, Artificial Sequence
  Description of Artificial Sequence:  Enzymatic Nucleic Acid
  misc_feature (31)..(31): n stands for inosine
cauuucaacugaugaggccguuaggccgaanggaggcg

SEQ ID NO: 16092 - RNA, 38 nt, Artificial Sequence
  Description of Artificial Sequence:  Enzymatic Nucleic Acid
  misc_feature (31)..(31): n stands for inosine
guuucuggcugaugaggccguuaggccgaanccaucca

SEQ ID NO: 16093 - RNA, 38 nt, Artificial Sequence
  Description of Artificial Sequence:  Enzymatic Nucleic Acid
  misc_feature (31)..(31): n stands for inosine
uguuucugcugaugaggccguuaggccgaangccaucc

SEQ ID NO: 16094 - RNA, 38 nt, Artificial Sequence
  Description of Artificial Sequence:  Enzymatic Nucleic Acid
  misc_feature (31)..(31): n stands for inosine
uuguuucucugaugaggccguuaggccgaanggccauc

SEQ ID NO: 16095 - RNA, 38 nt, Artificial Sequence
  Description of Artificial Sequence:  Enzymatic Nucleic Acid
  misc_feature (31)..(31): n stands for inosine
auuguuuccugaugaggccguuaggccgaangggccau

SEQ ID NO: 16096 - RNA, 38 nt, Artificial Sequence
  Description of Artificial Sequence:  Enzymatic Nucleic Acid
  misc_feature (31)..(31): n stands for inosine
ucaaaaaucugaugaggccguuaggccgaanuuucugg

SEQ ID NO: 16097 - RNA, 38 nt, Artificial Sequence
  Description of Artificial Sequence:  Enzymatic Nucleic Acid
  misc_feature (31)..(31): n stands for inosine
guacacuccugaugaggccguuaggccgaanucaaaaa

SEQ ID NO: 16098 - RNA, 38 nt, Artificial Sequence
  Description of Artificial Sequence:  Enzymatic Nucleic Acid
  misc_feature (31)..(31): n stands for inosine
cuggauugcugaugaggccguuaggccgaanuacacuc

SEQ ID NO: 16099 - RNA, 38 nt, Artificial Sequence
  Description of Artificial Sequence:  Enzymatic Nucleic Acid
  misc_feature (31)..(31): n stands for inosine
cucuggaucugaugaggccguuaggccgaanuguacac

SEQ ID NO: 16100 - RNA, 38 nt, Artificial Sequence
  Description of Artificial Sequence:  Enzymatic Nucleic Acid
  misc_feature (31)..(31): n stands for inosine
gucacucucugaugaggccguuaggccgaanauugugu

SEQ ID NO: 16101 - RNA, 38 nt, Artificial Sequence
  Description of Artificial Sequence:  Enzymatic Nucleic Acid
  misc_feature (31)..(31): n stands for inosine
cgucacuccugaugaggccguuaggccgaangauugug

SEQ ID NO: 16102 - RNA, 38 nt, Artificial Sequence
  Description of Artificial Sequence:  Enzymatic Nucleic Acid
  misc_feature (31)..(31): n stands for inosine
aaaagacccugaugaggccguuaggccgaanacgucac

SEQ ID NO: 16103 - RNA, 38 nt, Artificial Sequence
  Description of Artificial Sequence:  Enzymatic Nucleic Acid
  misc_feature (31)..(31): n stands for inosine
acaccaaacugaugaggccguuaggccgaanaccagac

SEQ ID NO: 16104 - RNA, 38 nt, Artificial Sequence
  Description of Artificial Sequence:  Enzymatic Nucleic Acid
  misc_feature (31)..(31): n stands for inosine
uuucccaccugaugaggccguuaggccgaancaaaaca

SEQ ID NO: 16105 - RNA, 38 nt, Artificial Sequence
  Description of Artificial Sequence:  Enzymatic Nucleic Acid
  misc_feature (31)..(31): n stands for inosine
gcaccuaacugaugaggccguuaggccgaanaaaauau

SEQ ID NO: 16106 - RNA, 38 nt, Artificial Sequence
  Description of Artificial Sequence:  Enzymatic Nucleic Acid
  misc_feature (31)..(31): n stands for inosine
agcaccuacugaugaggccguuaggccgaangaaaaua

SEQ ID NO: 16107 - RNA, 38 nt, Artificial Sequence
  Description of Artificial Sequence:  Enzymatic Nucleic Acid
  misc_feature (31)..(31): n stands for inosine
uauggagacugaugaggccguuaggccgaancaccuaa

SEQ ID NO: 16108 - RNA, 38 nt, Artificial Sequence
  Description of Artificial Sequence:  Enzymatic Nucleic Acid
  misc_feature (31)..(31): n stands for inosine
ggauauggcugaugaggccguuaggccgaanaagcacc

SEQ ID NO: 16109 - RNA, 38 nt, Artificial Sequence
  Description of Artificial Sequence:  Enzymatic Nucleic Acid
  misc_feature (31)..(31): n stands for inosine
caggauaucugaugaggccguuaggccgaanagaagca

SEQ ID NO: 16110 - RNA, 38 nt, Artificial Sequence
  Description of Artificial Sequence:  Enzymatic Nucleic Acid
  misc_feature (31)..(31): n stands for inosine
ccaggauacugaugaggccguuaggccgaangagaagc

SEQ ID NO: 16111 - RNA, 38 nt, Artificial Sequence
  Description of Artificial Sequence:  Enzymatic Nucleic Acid
  misc_feature (31)..(31): n stands for inosine
uuaccccacugaugaggccguuaggccgaanauaugga

SEQ ID NO: 16112 - RNA, 38 nt, Artificial Sequence
  Description of Artificial Sequence:  Enzymatic Nucleic Acid
  misc_feature (31)..(31): n stands for inosine
uuuacccccugaugaggccguuaggccgaangauaugg

SEQ ID NO: 16113 - RNA, 38 nt, Artificial Sequence
  Description of Artificial Sequence:  Enzymatic Nucleic Acid
  misc_feature (31)..(31): n stands for inosine
cucauucucugaugaggccguuaggccgaanuuccuuc

SEQ ID NO: 16114 - RNA, 38 nt, Artificial Sequence
  Description of Artificial Sequence:  Enzymatic Nucleic Acid
  misc_feature (31)..(31): n stands for inosine
uaaucaggcugaugaggccguuaggccgaancccucau

SEQ ID NO: 16115 - RNA, 38 nt, Artificial Sequence
  Description of Artificial Sequence:  Enzymatic Nucleic Acid
  misc_feature (31)..(31): n stands for inosine
auaaucagcugaugaggccguuaggccgaangcccuca

SEQ ID NO: 16116 - RNA, 38 nt, Artificial Sequence
  Description of Artificial Sequence:  Enzymatic Nucleic Acid
  misc_feature (31)..(31): n stands for inosine
uauaaucacugaugaggccguuaggccgaanggcccuc

SEQ ID NO: 16117 - RNA, 38 nt, Artificial Sequence
  Description of Artificial Sequence:  Enzymatic Nucleic Acid
  misc_feature (31)..(31): n stands for inosine
guauaauccugaugaggccguuaggccgaangggcccu

SEQ ID NO: 16118 - RNA, 38 nt, Artificial Sequence
  Description of Artificial Sequence:  Enzymatic Nucleic Acid
  misc_feature (31)..(31): n stands for inosine
ucuggugucugaugaggccguuaggccgaanuauaauc

SEQ ID NO: 16119 - RNA, 38 nt, Artificial Sequence
  Description of Artificial Sequence:  Enzymatic Nucleic Acid
  misc_feature (31)..(31): n stands for inosine
auuucuggcugaugaggccguuaggccgaanuaguaua

SEQ ID NO: 16120 - RNA, 38 nt, Artificial Sequence
  Description of Artificial Sequence:  Enzymatic Nucleic Acid
  misc_feature (31)..(31): n stands for inosine
acauuucucugaugaggccguuaggccgaanuguagua

SEQ ID NO: 16121 - RNA, 38 nt, Artificial Sequence
  Description of Artificial Sequence:  Enzymatic Nucleic Acid
  misc_feature (31)..(31): n stands for inosine
uacauuuccugaugaggccguuaggccgaanguguagu

SEQ ID NO: 16122 - RNA, 38 nt, Artificial Sequence
  Description of Artificial Sequence:  Enzymatic Nucleic Acid
  misc_feature (31)..(31): n stands for inosine
cauggucucugaugaggccguuaggccgaanuacauuu

SEQ ID NO: 16123 - RNA, 38 nt, Artificial Sequence
  Description of Artificial Sequence:  Enzymatic Nucleic Acid
  misc_feature (31)..(31): n stands for inosine
gcaugguccugaugaggccguuaggccgaanguacauu

SEQ ID NO: 16124 - RNA, 38 nt, Artificial Sequence
  Description of Artificial Sequence:  Enzymatic Nucleic Acid
  misc_feature (31)..(31): n stands for inosine
uccagcaucugaugaggccguuaggccgaanucuggua

SEQ ID NO: 16125 - RNA, 38 nt, Artificial Sequence
  Description of Artificial Sequence:  Enzymatic Nucleic Acid
  misc_feature (31)..(31): n stands for inosine
guccagcacugaugaggccguuaggccgaangucuggu

SEQ ID NO: 16126 - RNA, 38 nt, Artificial Sequence
  Description of Artificial Sequence:  Enzymatic Nucleic Acid
  misc_feature (31)..(31): n stands for inosine
agcagucccugaugaggccguuaggccgaancaugguc

SEQ ID NO: 16127 - RNA, 38 nt, Artificial Sequence
  Description of Artificial Sequence:  Enzymatic Nucleic Acid
  misc_feature (31)..(31): n stands for inosine
cccgugcccugaugaggccguuaggccgaancagucca

SEQ ID NO: 16128 - RNA, 38 nt, Artificial Sequence
  Description of Artificial Sequence:  Enzymatic Nucleic Acid
  misc_feature (31)..(31): n stands for inosine
gcuccccgcugaugaggccguuaggccgaanccagcag

SEQ ID NO: 16129 - RNA, 38 nt, Artificial Sequence
  Description of Artificial Sequence:  Enzymatic Nucleic Acid
  misc_feature (31)..(31): n stands for inosine
ucugacugcugaugaggccguuaggccgaancuccccg

SEQ ID NO: 16130 - RNA, 38 nt, Artificial Sequence
  Description of Artificial Sequence:  Enzymatic Nucleic Acid
  misc_feature (31)..(31): n stands for inosine
cucugacucugaugaggccguuaggccgaangcucccc

SEQ ID NO: 16131 - RNA, 38 nt, Artificial Sequence
  Description of Artificial Sequence:  Enzymatic Nucleic Acid
  misc_feature (31)..(31): n stands for inosine
ucucugaccugaugaggccguuaggccgaanggcuccc

SEQ ID NO: 16132 - RNA, 38 nt, Artificial Sequence
  Description of Artificial Sequence:  Enzymatic Nucleic Acid
  misc_feature (31)..(31): n stands for inosine
ugggucuccugaugaggccguuaggccgaanacugggc

SEQ ID NO: 16133 - RNA, 38 nt, Artificial Sequence
  Description of Artificial Sequence:  Enzymatic Nucleic Acid
  misc_feature (31)..(31): n stands for inosine
aaaacgugcugaugaggccguuaggccgaanucucuga

SEQ ID NO: 16134 - RNA, 38 nt, Artificial Sequence
  Description of Artificial Sequence:  Enzymatic Nucleic Acid
  misc_feature (31)..(31): n stands for inosine
gaaaacgucugaugaggccguuaggccgaangucucug

SEQ ID NO: 16135 - RNA, 38 nt, Artificial Sequence
  Description of Artificial Sequence:  Enzymatic Nucleic Acid
  misc_feature (31)..(31): n stands for inosine
ugaaaacgcugaugaggccguuaggccgaanggucucu

SEQ ID NO: 16136 - RNA, 38 nt, Artificial Sequence
  Description of Artificial Sequence:  Enzymatic Nucleic Acid
  misc_feature (31)..(31): n stands for inosine
accaacuccugaugaggccguuaggccgaanaaaacgu

SEQ ID NO: 16137 - RNA, 38 nt, Artificial Sequence
  Description of Artificial Sequence:  Enzymatic Nucleic Acid
  misc_feature (31)..(31): n stands for inosine
uucccaaacugaugaggccguuaggccgaanuuccacc

SEQ ID NO: 16138 - RNA, 38 nt, Artificial Sequence
  Description of Artificial Sequence:  Enzymatic Nucleic Acid
  misc_feature (31)..(31): n stands for inosine
cuugcaagcugaugaggccguuaggccgaanauuuccc

SEQ ID NO: 16139 - RNA, 38 nt, Artificial Sequence
  Description of Artificial Sequence:  Enzymatic Nucleic Acid
  misc_feature (31)..(31): n stands for inosine
agcuugcacugaugaggccguuaggccgaanagauuuc

SEQ ID NO: 16140 - RNA, 38 nt, Artificial Sequence
  Description of Artificial Sequence:  Enzymatic Nucleic Acid
  misc_feature (31)..(31): n stands for inosine
cauuagcucugaugaggccguuaggccgaancaagaga

SEQ ID NO: 16141 - RNA, 38 nt, Artificial Sequence
  Description of Artificial Sequence:  Enzymatic Nucleic Acid
  misc_feature (31)..(31): n stands for inosine
ugagcauucugaugaggccguuaggccgaancuugcaa

SEQ ID NO: 16142 - RNA, 38 nt, Artificial Sequence
  Description of Artificial Sequence:  Enzymatic Nucleic Acid
  misc_feature (31)..(31): n stands for inosine
uccugcugcugaugaggccguuaggccgaancauuagc

SEQ ID NO: 16143 - RNA, 38 nt, Artificial Sequence
  Description of Artificial Sequence:  Enzymatic Nucleic Acid
  misc_feature (31)..(31): n stands for inosine
cauccugccugaugaggccguuaggccgaanagcauua

SEQ ID NO: 16144 - RNA, 38 nt, Artificial Sequence
  Description of Artificial Sequence:  Enzymatic Nucleic Acid
  misc_feature (31)..(31): n stands for inosine
ugccaucccugaugaggccguuaggccgaancugagca

SEQ ID NO: 16145 - RNA, 38 nt, Artificial Sequence
  Description of Artificial Sequence:  Enzymatic Nucleic Acid
  misc_feature (31)..(31): n stands for inosine
guagucuucugaugaggccguuaggccgaanccauccu

SEQ ID NO: 16146 - RNA, 38 nt, Artificial Sequence
  Description of Artificial Sequence:  Enzymatic Nucleic Acid
  misc_feature (31)..(31): n stands for inosine
aacaaugucugaugaggccguuaggccgaanucuuugc

SEQ ID NO: 16147 - RNA, 38 nt, Artificial Sequence
  Description of Artificial Sequence:  Enzymatic Nucleic Acid
  misc_feature (31)..(31): n stands for inosine
aagaacaacugaugaggccguuaggccgaanuagucuu

SEQ ID NO: 16148 - RNA, 38 nt, Artificial Sequence
  Description of Artificial Sequence:  Enzymatic Nucleic Acid
  misc_feature (31)..(31): n stands for inosine
auaucggacugaugaggccguuaggccgaanaacaaug

SEQ ID NO: 16149 - RNA, 38 nt, Artificial Sequence
  Description of Artificial Sequence:  Enzymatic Nucleic Acid
  misc_feature (31)..(31): n stands for inosine
cugauauccugaugaggccguuaggccgaanaagaaca

SEQ ID NO: 16150 - RNA, 38 nt, Artificial Sequence
  Description of Artificial Sequence:  Enzymatic Nucleic Acid
  misc_feature (31)..(31): n stands for inosine
aaagucuccugaugaggccguuaggccgaanauaucgg

SEQ ID NO: 16151 - RNA, 38 nt, Artificial Sequence
  Description of Artificial Sequence:  Enzymatic Nucleic Acid
  misc_feature (31)..(31): n stands for inosine
augcucaacugaugaggccguuaggccgaanucucuga

SEQ ID NO: 16152 - RNA, 38 nt, Artificial Sequence
  Description of Artificial Sequence:  Enzymatic Nucleic Acid
  misc_feature (31)..(31): n stands for inosine
cucuuccacugaugaggccguuaggccgaancucaaag

SEQ ID NO: 16153 - RNA, 38 nt, Artificial Sequence
  Description of Artificial Sequence:  Enzymatic Nucleic Acid
  misc_feature (31)..(31): n stands for inosine
gagagucccugaugaggccguuaggccgaanaauccuc

SEQ ID NO: 16154 - RNA, 38 nt, Artificial Sequence
  Description of Artificial Sequence:  Enzymatic Nucleic Acid
  misc_feature (31)..(31): n stands for inosine
gcagagagcugaugaggccguuaggccgaanuccagaa

SEQ ID NO: 16155 - RNA, 38 nt, Artificial Sequence
  Description of Artificial Sequence:  Enzymatic Nucleic Acid
  misc_feature (31)..(31): n stands for inosine
aggcagagcugaugaggccguuaggccgaanaguccag

SEQ ID NO: 16156 - RNA, 38 nt, Artificial Sequence
  Description of Artificial Sequence:  Enzymatic Nucleic Acid
  misc_feature (31)..(31): n stands for inosine
guaggcagcugaugaggccguuaggccgaanagagucc

SEQ ID NO: 16157 - RNA, 38 nt, Artificial Sequence
  Description of Artificial Sequence:  Enzymatic Nucleic Acid
  misc_feature (31)..(31): n stands for inosine
agguaggccugaugaggccguuaggccgaanagagagu

SEQ ID NO: 16158 - RNA, 38 nt, Artificial Sequence
  Description of Artificial Sequence:  Enzymatic Nucleic Acid
  misc_feature (31)..(31): n stands for inosine
gugagguacugaugaggccguuaggccgaancagagag

SEQ ID NO: 16159 - RNA, 38 nt, Artificial Sequence
  Description of Artificial Sequence:  Enzymatic Nucleic Acid
  misc_feature (31)..(31): n stands for inosine
ggugaggucugaugaggccguuaggccgaangcagaga

SEQ ID NO: 16160 - RNA, 38 nt, Artificial Sequence
  Description of Artificial Sequence:  Enzymatic Nucleic Acid
  misc_feature (31)..(31): n stands for inosine
acaggugacugaugaggccguuaggccgaanuaggcag

SEQ ID NO: 16161 - RNA, 38 nt, Artificial Sequence
  Description of Artificial Sequence:  Enzymatic Nucleic Acid
  misc_feature (31)..(31): n stands for inosine
aacaggugcugaugaggccguuaggccgaanguaggca

SEQ ID NO: 16162 - RNA, 38 nt, Artificial Sequence
  Description of Artificial Sequence:  Enzymatic Nucleic Acid
  misc_feature (31)..(31): n stands for inosine
gaaacaggcugaugaggccguuaggccgaanagguagg

SEQ ID NO: 16163 - RNA, 38 nt, Artificial Sequence
  Description of Artificial Sequence:  Enzymatic Nucleic Acid
  misc_feature (31)..(31): n stands for inosine
aggaaacacugaugaggccguuaggccgaanugaggua

SEQ ID NO: 16164 - RNA, 38 nt, Artificial Sequence
  Description of Artificial Sequence:  Enzymatic Nucleic Acid
  misc_feature (31)..(31): n stands for inosine
caggaaaccugaugaggccguuaggccgaangugaggu

SEQ ID NO: 16165 - RNA, 38 nt, Artificial Sequence
  Description of Artificial Sequence:  Enzymatic Nucleic Acid
  misc_feature (31)..(31): n stands for inosine
uccauacacugaugaggccguuaggccgaanaaacagg

SEQ ID NO: 16166 - RNA, 38 nt, Artificial Sequence
  Description of Artificial Sequence:  Enzymatic Nucleic Acid
  misc_feature (31)..(31): n stands for inosine
cuccauaccugaugaggccguuaggccgaangaaacag

SEQ ID NO: 16167 - RNA, 38 nt, Artificial Sequence
  Description of Artificial Sequence:  Enzymatic Nucleic Acid
  misc_feature (31)..(31): n stands for inosine
gaauuuggcugaugaggccguuaggccgaanucacaua

SEQ ID NO: 16168 - RNA, 38 nt, Artificial Sequence
  Description of Artificial Sequence:  Enzymatic Nucleic Acid
  misc_feature (31)..(31): n stands for inosine
ggaauuugcugaugaggccguuaggccgaangucacau

SEQ ID NO: 16169 - RNA, 38 nt, Artificial Sequence
  Description of Artificial Sequence:  Enzymatic Nucleic Acid
  misc_feature (31)..(31): n stands for inosine
uggaauuucugaugaggccguuaggccgaanggucaca

SEQ ID NO: 16170 - RNA, 38 nt, Artificial Sequence
  Description of Artificial Sequence:  Enzymatic Nucleic Acid
  misc_feature (31)..(31): n stands for inosine
auggaauucugaugaggccguuaggccgaangggucac

SEQ ID NO: 16171 - RNA, 38 nt, Artificial Sequence
  Description of Artificial Sequence:  Enzymatic Nucleic Acid
  misc_feature (31)..(31): n stands for inosine
gucauaaucugaugaggccguuaggccgaanaauuugg

SEQ ID NO: 16172 - RNA, 38 nt, Artificial Sequence
  Description of Artificial Sequence:  Enzymatic Nucleic Acid
  misc_feature (31)..(31): n stands for inosine
ugucauaacugaugaggccguuaggccgaangaauuug

SEQ ID NO: 16173 - RNA, 38 nt, Artificial Sequence
  Description of Artificial Sequence:  Enzymatic Nucleic Acid
  misc_feature (31)..(31): n stands for inosine
ugcugugucugaugaggccguuaggccgaanucauaau

SEQ ID NO: 16174 - RNA, 38 nt, Artificial Sequence
  Description of Artificial Sequence:  Enzymatic Nucleic Acid
  misc_feature (31)..(31): n stands for inosine
uccugcugcugaugaggccguuaggccgaanuugucau

SEQ ID NO: 16175 - RNA, 38 nt, Artificial Sequence
  Description of Artificial Sequence:  Enzymatic Nucleic Acid
  misc_feature (31)..(31): n stands for inosine
auuccugccugaugaggccguuaggccgaanuguuguc

SEQ ID NO: 16176 - RNA, 38 nt, Artificial Sequence
  Description of Artificial Sequence:  Enzymatic Nucleic Acid
  misc_feature (31)..(31): n stands for inosine
cugauucccugaugaggccguuaggccgaancuguguu

SEQ ID NO: 16177 - RNA, 38 nt, Artificial Sequence
  Description of Artificial Sequence:  Enzymatic Nucleic Acid
  misc_feature (31)..(31): n stands for inosine
auacugaccugaugaggccguuaggccgaanauuccug

SEQ ID NO: 16178 - RNA, 38 nt, Artificial Sequence
  Description of Artificial Sequence:  Enzymatic Nucleic Acid
  misc_feature (31)..(31): n stands for inosine
gcagauaccugaugaggccguuaggccgaanacugauu

SEQ ID NO: 16179 - RNA, 38 nt, Artificial Sequence
  Description of Artificial Sequence:  Enzymatic Nucleic Acid
  misc_feature (31)..(31): n stands for inosine
uguucugccugaugaggccguuaggccgaanauacuga

SEQ ID NO: 16180 - RNA, 38 nt, Artificial Sequence
  Description of Artificial Sequence:  Enzymatic Nucleic Acid
  misc_feature (31)..(31): n stands for inosine
uacuguuccugaugaggccguuaggccgaancagauac

SEQ ID NO: 16181 - RNA, 38 nt, Artificial Sequence
  Description of Artificial Sequence:  Enzymatic Nucleic Acid
  misc_feature (31)..(31): n stands for inosine
ucgcuuaccugaugaggccguuaggccgaanuucugca

SEQ ID NO: 16182 - RNA, 38 nt, Artificial Sequence
  Description of Artificial Sequence:  Enzymatic Nucleic Acid
  misc_feature (31)..(31): n stands for inosine
cacaggcccugaugaggccguuaggccgaancucuuuc

SEQ ID NO: 16183 - RNA, 38 nt, Artificial Sequence
  Description of Artificial Sequence:  Enzymatic Nucleic Acid
  misc_feature (31)..(31): n stands for inosine
cacucacacugaugaggccguuaggccgaanccggcuc

SEQ ID NO: 16184 - RNA, 38 nt, Artificial Sequence
  Description of Artificial Sequence:  Enzymatic Nucleic Acid
  misc_feature (31)..(31): n stands for inosine
acacucaccugaugaggccguuaggccgaangccggcu

SEQ ID NO: 16185 - RNA, 38 nt, Artificial Sequence
  Description of Artificial Sequence:  Enzymatic Nucleic Acid
  misc_feature (31)..(31): n stands for inosine
ucuucaaacugaugaggccguuaggccgaanuuuuuac

SEQ ID NO: 16186 - RNA, 38 nt, Artificial Sequence
  Description of Artificial Sequence:  Enzymatic Nucleic Acid
  misc_feature (31)..(31): n stands for inosine
uucuaacgcugaugaggccguuaggccgaanauaucuu

SEQ ID NO: 16187 - RNA, 38 nt, Artificial Sequence
  Description of Artificial Sequence:  Enzymatic Nucleic Acid
  misc_feature (31)..(31): n stands for inosine
cuucuaaccugaugaggccguuaggccgaangauaucu

SEQ ID NO: 16188 - RNA, 38 nt, Artificial Sequence
  Description of Artificial Sequence:  Enzymatic Nucleic Acid
  misc_feature (31)..(31): n stands for inosine
uuacuucucugaugaggccguuaggccgaanuucuucu

SEQ ID NO: 16189 - RNA, 38 nt, Artificial Sequence
  Description of Artificial Sequence:  Enzymatic Nucleic Acid
  misc_feature (31)..(31): n stands for inosine
uuuacuuccugaugaggccguuaggccgaanguucuuc

SEQ ID NO: 16190 - RNA, 38 nt, Artificial Sequence
  Description of Artificial Sequence:  Enzymatic Nucleic Acid
  misc_feature (31)..(31): n stands for inosine
gucaucugcugaugaggccguuaggccgaanauuacuu

SEQ ID NO: 16191 - RNA, 38 nt, Artificial Sequence
  Description of Artificial Sequence:  Enzymatic Nucleic Acid
  misc_feature (31)..(31): n stands for inosine
ugucaucucugaugaggccguuaggccgaangauuacu

SEQ ID NO: 16192 - RNA, 38 nt, Artificial Sequence
  Description of Artificial Sequence:  Enzymatic Nucleic Acid
  misc_feature (31)..(31): n stands for inosine
uugucauccugaugaggccguuaggccgaanggauuac

SEQ ID NO: 16193 - RNA, 38 nt, Artificial Sequence
  Description of Artificial Sequence:  Enzymatic Nucleic Acid
  misc_feature (31)..(31): n stands for inosine
cgucuggucugaugaggccguuaggccgaanucaucug

SEQ ID NO: 16194 - RNA, 38 nt, Artificial Sequence
  Description of Artificial Sequence:  Enzymatic Nucleic Acid
  misc_feature (31)..(31): n stands for inosine
guccgucucugaugaggccguuaggccgaanuugucau

SEQ ID NO: 16195 - RNA, 38 nt, Artificial Sequence
  Description of Artificial Sequence:  Enzymatic Nucleic Acid
  misc_feature (31)..(31): n stands for inosine
uguccguccugaugaggccguuaggccgaanguuguca

SEQ ID NO: 16196 - RNA, 38 nt, Artificial Sequence
  Description of Artificial Sequence:  Enzymatic Nucleic Acid
  misc_feature (31)..(31): n stands for inosine
cauaccaccugaugaggccguuaggccgaanuccgucu

SEQ ID NO: 16197 - RNA, 38 nt, Artificial Sequence
  Description of Artificial Sequence:  Enzymatic Nucleic Acid
  misc_feature (31)..(31): n stands for inosine
cugaggcacugaugaggccguuaggccgaanaaccaua

SEQ ID NO: 16198 - RNA, 38 nt, Artificial Sequence
  Description of Artificial Sequence:  Enzymatic Nucleic Acid
  misc_feature (31)..(31): n stands for inosine
ucuucugacugaugaggccguuaggccgaancaagaac

SEQ ID NO: 16199 - RNA, 38 nt, Artificial Sequence
  Description of Artificial Sequence:  Enzymatic Nucleic Acid
  misc_feature (31)..(31): n stands for inosine
cucuucugcugaugaggccguuaggccgaangcaagaa

SEQ ID NO: 16200 - RNA, 38 nt, Artificial Sequence
  Description of Artificial Sequence:  Enzymatic Nucleic Acid
  misc_feature (31)..(31): n stands for inosine
agcucuuccugaugaggccguuaggccgaanaggcaag

SEQ ID NO: 16201 - RNA, 38 nt, Artificial Sequence
  Description of Artificial Sequence:  Enzymatic Nucleic Acid
  misc_feature (31)..(31): n stands for inosine
aaguuuuccugaugaggccguuaggccgaancucuucu

SEQ ID NO: 16202 - RNA, 38 nt, Artificial Sequence
  Description of Artificial Sequence:  Enzymatic Nucleic Acid
  misc_feature (31)..(31): n stands for inosine
ucuuccaacugaugaggccguuaggccgaanuuuucag

SEQ ID NO: 16203 - RNA, 38 nt, Artificial Sequence
  Description of Artificial Sequence:  Enzymatic Nucleic Acid
  misc_feature (31)..(31): n stands for inosine
uuugguuccugaugaggccguuaggccgaanucuucca

SEQ ID NO: 16204 - RNA, 38 nt, Artificial Sequence
  Description of Artificial Sequence:  Enzymatic Nucleic Acid
  misc_feature (31)..(31): n stands for inosine
gauaauuucugaugaggccguuaggccgaanuucuguc

SEQ ID NO: 16205 - RNA, 38 nt, Artificial Sequence
  Description of Artificial Sequence:  Enzymatic Nucleic Acid
  misc_feature (31)..(31): n stands for inosine
agauaauucugaugaggccguuaggccgaanguucugu

SEQ ID NO: 16206 - RNA, 38 nt, Artificial Sequence
  Description of Artificial Sequence:  Enzymatic Nucleic Acid
  misc_feature (31)..(31): n stands for inosine
aaagauggcugaugaggccguuaggccgaanauaauuu

SEQ ID NO: 16207 - RNA, 38 nt, Artificial Sequence
  Description of Artificial Sequence:  Enzymatic Nucleic Acid
  misc_feature (31)..(31): n stands for inosine
caaaagaucugaugaggccguuaggccgaanagauaau

SEQ ID NO: 16208 - RNA, 38 nt, Artificial Sequence
  Description of Artificial Sequence:  Enzymatic Nucleic Acid
  misc_feature (31)..(31): n stands for inosine
ccaaaagacugaugaggccguuaggccgaangagauaa

SEQ ID NO: 16209 - RNA, 38 nt, Artificial Sequence
  Description of Artificial Sequence:  Enzymatic Nucleic Acid
  misc_feature (31)..(31): n stands for inosine
ccaccaaacugaugaggccguuaggccgaanauggaga

SEQ ID NO: 16210 - RNA, 38 nt, Artificial Sequence
  Description of Artificial Sequence:  Enzymatic Nucleic Acid
  misc_feature (31)..(31): n stands for inosine
uuuugcugcugaugaggccguuaggccgaancaccauu

SEQ ID NO: 16211 - RNA, 38 nt, Artificial Sequence
  Description of Artificial Sequence:  Enzymatic Nucleic Acid
  misc_feature (31)..(31): n stands for inosine
cuuuugcucugaugaggccguuaggccgaangcaccau

SEQ ID NO: 16212 - RNA, 38 nt, Artificial Sequence
  Description of Artificial Sequence:  Enzymatic Nucleic Acid
  misc_feature (31)..(31): n stands for inosine
gcuuuugccugaugaggccguuaggccgaanggcacca

SEQ ID NO: 16213 - RNA, 38 nt, Artificial Sequence
  Description of Artificial Sequence:  Enzymatic Nucleic Acid
  misc_feature (31)..(31): n stands for inosine
ccugcuuucugaugaggccguuaggccgaancugggca

SEQ ID NO: 16214 - RNA, 38 nt, Artificial Sequence
  Description of Artificial Sequence:  Enzymatic Nucleic Acid
  misc_feature (31)..(31): n stands for inosine
agacuccccugaugaggccguuaggccgaancuuuugc

SEQ ID NO: 16215 - RNA, 38 nt, Artificial Sequence
  Description of Artificial Sequence:  Enzymatic Nucleic Acid
  misc_feature (31)..(31): n stands for inosine
gaugccaccugaugaggccguuaggccgaanacucccu

SEQ ID NO: 16216 - RNA, 38 nt, Artificial Sequence
  Description of Artificial Sequence:  Enzymatic Nucleic Acid
  misc_feature (31)..(31): n stands for inosine
ccuucagacugaugaggccguuaggccgaanccacaga

SEQ ID NO: 16217 - RNA, 38 nt, Artificial Sequence
  Description of Artificial Sequence:  Enzymatic Nucleic Acid
  misc_feature (31)..(31): n stands for inosine
gagccuuccugaugaggccguuaggccgaanaugccac

SEQ ID NO: 16218 - RNA, 38 nt, Artificial Sequence
  Description of Artificial Sequence:  Enzymatic Nucleic Acid
  misc_feature (31)..(31): n stands for inosine
cugguuugcugaugaggccguuaggccgaanccuucag

SEQ ID NO: 16219 - RNA, 38 nt, Artificial Sequence
  Description of Artificial Sequence:  Enzymatic Nucleic Acid
  misc_feature (31)..(31): n stands for inosine
gucugguucugaugaggccguuaggccgaanagccuuc

SEQ ID NO: 16220 - RNA, 38 nt, Artificial Sequence
  Description of Artificial Sequence:  Enzymatic Nucleic Acid
  misc_feature (31)..(31): n stands for inosine
gcuugucucugaugaggccguuaggccgaanuuugagc

SEQ ID NO: 16221 - RNA, 38 nt, Artificial Sequence
  Description of Artificial Sequence:  Enzymatic Nucleic Acid
  misc_feature (31)..(31): n stands for inosine
cgcuuguccugaugaggccguuaggccgaanguuugag

SEQ ID NO: 16222 - RNA, 38 nt, Artificial Sequence
  Description of Artificial Sequence:  Enzymatic Nucleic Acid
  misc_feature (31)..(31): n stands for inosine
uagccgcucugaugaggccguuaggccgaanucugguu

SEQ ID NO: 16223 - RNA, 38 nt, Artificial Sequence
  Description of Artificial Sequence:  Enzymatic Nucleic Acid
  misc_feature (31)..(31): n stands for inosine
ggacuggucugaugaggccguuaggccgaanccgcuug

SEQ ID NO: 16224 - RNA, 38 nt, Artificial Sequence
  Description of Artificial Sequence:  Enzymatic Nucleic Acid
  misc_feature (31)..(31): n stands for inosine
uccggacucugaugaggccguuaggccgaanuagccgc

SEQ ID NO: 16225 - RNA, 38 nt, Artificial Sequence
  Description of Artificial Sequence:  Enzymatic Nucleic Acid
  misc_feature (31)..(31): n stands for inosine
auccggaccugaugaggccguuaggccgaanguagccg

SEQ ID NO: 16226 - RNA, 38 nt, Artificial Sequence
  Description of Artificial Sequence:  Enzymatic Nucleic Acid
  misc_feature (31)..(31): n stands for inosine
ugauaucccugaugaggccguuaggccgaanacuggua

SEQ ID NO: 16227 - RNA, 38 nt, Artificial Sequence
  Description of Artificial Sequence:  Enzymatic Nucleic Acid
  misc_feature (31)..(31): n stands for inosine
caucggagcugaugaggccguuaggccgaanauauccg

SEQ ID NO: 16228 - RNA, 38 nt, Artificial Sequence
  Description of Artificial Sequence:  Enzymatic Nucleic Acid
  misc_feature (31)..(31): n stands for inosine
gucaucggcugaugaggccguuaggccgaanugauauc

SEQ ID NO: 16229 - RNA, 38 nt, Artificial Sequence
  Description of Artificial Sequence:  Enzymatic Nucleic Acid
  misc_feature (31)..(31): n stands for inosine
gugucauccugaugaggccguuaggccgaanagugaua

SEQ ID NO: 16230 - RNA, 38 nt, Artificial Sequence
  Description of Artificial Sequence:  Enzymatic Nucleic Acid
  misc_feature (31)..(31): n stands for inosine
ggugucugcugaugaggccguuaggccgaanucaucgg

SEQ ID NO: 16231 - RNA, 38 nt, Artificial Sequence
  Description of Artificial Sequence:  Enzymatic Nucleic Acid
  misc_feature (31)..(31): n stands for inosine
gugguguccugaugaggccguuaggccgaanugucauc

SEQ ID NO: 16232 - RNA, 38 nt, Artificial Sequence
  Description of Artificial Sequence:  Enzymatic Nucleic Acid
  misc_feature (31)..(31): n stands for inosine
cacgguggcugaugaggccguuaggccgaanucugugu

SEQ ID NO: 16233 - RNA, 38 nt, Artificial Sequence
  Description of Artificial Sequence:  Enzymatic Nucleic Acid
  misc_feature (31)..(31): n stands for inosine
uacacggucugaugaggccguuaggccgaanugucugu

SEQ ID NO: 16234 - RNA, 38 nt, Artificial Sequence
  Description of Artificial Sequence:  Enzymatic Nucleic Acid
  misc_feature (31)..(31): n stands for inosine
guacacggcugaugaggccguuaggccgaangugucug

SEQ ID NO: 16235 - RNA, 38 nt, Artificial Sequence
  Description of Artificial Sequence:  Enzymatic Nucleic Acid
  misc_feature (31)..(31): n stands for inosine
gaguacaccugaugaggccguuaggccgaanugguguc

SEQ ID NO: 16236 - RNA, 38 nt, Artificial Sequence
  Description of Artificial Sequence:  Enzymatic Nucleic Acid
  misc_feature (31)..(31): n stands for inosine
cucacuggcugaugaggccguuaggccgaanuacacgg

SEQ ID NO: 16237 - RNA, 38 nt, Artificial Sequence
  Description of Artificial Sequence:  Enzymatic Nucleic Acid
  misc_feature (31)..(31): n stands for inosine
uccucacucugaugaggccguuaggccgaanaguacac

SEQ ID NO: 16238 - RNA, 38 nt, Artificial Sequence
  Description of Artificial Sequence:  Enzymatic Nucleic Acid
  misc_feature (31)..(31): n stands for inosine
uuccucaccugaugaggccguuaggccgaangaguaca

SEQ ID NO: 16239 - RNA, 38 nt, Artificial Sequence
  Description of Artificial Sequence:  Enzymatic Nucleic Acid
  misc_feature (31)..(31): n stands for inosine
aaaaguuccugaugaggccguuaggccgaancuuccuc

SEQ ID NO: 16240 - RNA, 38 nt, Artificial Sequence
  Description of Artificial Sequence:  Enzymatic Nucleic Acid
  misc_feature (31)..(31): n stands for inosine
gcuuuaaacugaugaggccguuaggccgaanuucugcu

SEQ ID NO: 16241 - RNA, 38 nt, Artificial Sequence
  Description of Artificial Sequence:  Enzymatic Nucleic Acid
  misc_feature (31)..(31): n stands for inosine
ucucuauccugaugaggccguuaggccgaancuuuaaa

SEQ ID NO: 16242 - RNA, 38 nt, Artificial Sequence
  Description of Artificial Sequence:  Enzymatic Nucleic Acid
  misc_feature (31)..(31): n stands for inosine
uaccgguucugaugaggccguuaggccgaancacucca

SEQ ID NO: 16243 - RNA, 38 nt, Artificial Sequence
  Description of Artificial Sequence:  Enzymatic Nucleic Acid
  misc_feature (31)..(31): n stands for inosine
gugcuacccugaugaggccguuaggccgaanuuugcac

SEQ ID NO: 16244 - RNA, 38 nt, Artificial Sequence
  Description of Artificial Sequence:  Enzymatic Nucleic Acid
  misc_feature (31)..(31): n stands for inosine
cugggcugcugaugaggccguuaggccgaancuaccgg

SEQ ID NO: 16245 - RNA, 38 nt, Artificial Sequence
  Description of Artificial Sequence:  Enzymatic Nucleic Acid
  misc_feature (31)..(31): n stands for inosine
aucugggccugaugaggccguuaggccgaanugcuacc

SEQ ID NO: 16246 - RNA, 38 nt, Artificial Sequence
  Description of Artificial Sequence:  Enzymatic Nucleic Acid
  misc_feature (31)..(31): n stands for inosine
agaaucugcugaugaggccguuaggccgaancugugcu

SEQ ID NO: 16247 - RNA, 38 nt, Artificial Sequence
  Description of Artificial Sequence:  Enzymatic Nucleic Acid
  misc_feature (31)..(31): n stands for inosine
gagaaucucugaugaggccguuaggccgaangcugugc

SEQ ID NO: 16248 - RNA, 38 nt, Artificial Sequence
  Description of Artificial Sequence:  Enzymatic Nucleic Acid
  misc_feature (31)..(31): n stands for inosine
ggagaauccugaugaggccguuaggccgaanggcugug

SEQ ID NO: 16249 - RNA, 38 nt, Artificial Sequence
  Description of Artificial Sequence:  Enzymatic Nucleic Acid
  misc_feature (31)..(31): n stands for inosine
caggcuggcugaugaggccguuaggccgaanaaucugg

SEQ ID NO: 16250 - RNA, 38 nt, Artificial Sequence
  Description of Artificial Sequence:  Enzymatic Nucleic Acid
  misc_feature (31)..(31): n stands for inosine
gucaggcucugaugaggccguuaggccgaanagaaucu

SEQ ID NO: 16251 - RNA, 38 nt, Artificial Sequence
  Description of Artificial Sequence:  Enzymatic Nucleic Acid
  misc_feature (31)..(31): n stands for inosine
ugucaggccugaugaggccguuaggccgaangagaauc

SEQ ID NO: 16252 - RNA, 38 nt, Artificial Sequence
  Description of Artificial Sequence:  Enzymatic Nucleic Acid
  misc_feature (31)..(31): n stands for inosine
ccgugucacugaugaggccguuaggccgaancuggaga

SEQ ID NO: 16253 - RNA, 38 nt, Artificial Sequence
  Description of Artificial Sequence:  Enzymatic Nucleic Acid
  misc_feature (31)..(31): n stands for inosine
cccguguccugaugaggccguuaggccgaangcuggag

SEQ ID NO: 16254 - RNA, 38 nt, Artificial Sequence
  Description of Artificial Sequence:  Enzymatic Nucleic Acid
  misc_feature (31)..(31): n stands for inosine
gguccccgcugaugaggccguuaggccgaanucaggcu

SEQ ID NO: 16255 - RNA, 38 nt, Artificial Sequence
  Description of Artificial Sequence:  Enzymatic Nucleic Acid
  misc_feature (31)..(31): n stands for inosine
cucagugucugaugaggccguuaggccgaanuccccgu

SEQ ID NO: 16256 - RNA, 38 nt, Artificial Sequence
  Description of Artificial Sequence:  Enzymatic Nucleic Acid
  misc_feature (31)..(31): n stands for inosine
gcucagugcugaugaggccguuaggccgaanguccccg

SEQ ID NO: 16257 - RNA, 38 nt, Artificial Sequence
  Description of Artificial Sequence:  Enzymatic Nucleic Acid
  misc_feature (31)..(31): n stands for inosine
gagcucagcugaugaggccguuaggccgaanugguccc

SEQ ID NO: 16258 - RNA, 38 nt, Artificial Sequence
  Description of Artificial Sequence:  Enzymatic Nucleic Acid
  misc_feature (31)..(31): n stands for inosine
gagagcuccugaugaggccguuaggccgaanugugguc

SEQ ID NO: 16259 - RNA, 38 nt, Artificial Sequence
  Description of Artificial Sequence:  Enzymatic Nucleic Acid
  misc_feature (31)..(31): n stands for inosine
aggaggagcugaugaggccguuaggccgaancucagug

SEQ ID NO: 16260 - RNA, 38 nt, Artificial Sequence
  Description of Artificial Sequence:  Enzymatic Nucleic Acid
  misc_feature (31)..(31): n stands for inosine
acaggaggcugaugaggccguuaggccgaanagcucag

SEQ ID NO: 16261 - RNA, 38 nt, Artificial Sequence
  Description of Artificial Sequence:  Enzymatic Nucleic Acid
  misc_feature (31)..(31): n stands for inosine
aaacaggacugaugaggccguuaggccgaanagagcuc

SEQ ID NO: 16262 - RNA, 38 nt, Artificial Sequence
  Description of Artificial Sequence:  Enzymatic Nucleic Acid
  misc_feature (31)..(31): n stands for inosine
uaaacaggcugaugaggccguuaggccgaangagagcu

SEQ ID NO: 16263 - RNA, 38 nt, Artificial Sequence
  Description of Artificial Sequence:  Enzymatic Nucleic Acid
  misc_feature (31)..(31): n stands for inosine
uuuaaacacugaugaggccguuaggccgaanaggagag

SEQ ID NO: 16264 - RNA, 38 nt, Artificial Sequence
  Description of Artificial Sequence:  Enzymatic Nucleic Acid
  misc_feature (31)..(31): n stands for inosine
uuuuaaaccugaugaggccguuaggccgaangaggaga

SEQ ID NO: 16265 - RNA, 38 nt, Artificial Sequence
  Description of Artificial Sequence:  Enzymatic Nucleic Acid
  misc_feature (31)..(31): n stands for inosine
gguguggacugaugaggccguuaggccgaancuuccuu

SEQ ID NO: 16266 - RNA, 38 nt, Artificial Sequence
  Description of Artificial Sequence:  Enzymatic Nucleic Acid
  misc_feature (31)..(31): n stands for inosine
uggggugucugaugaggccguuaggccgaanaugcuuc

SEQ ID NO: 16267 - RNA, 38 nt, Artificial Sequence
  Description of Artificial Sequence:  Enzymatic Nucleic Acid
  misc_feature (31)..(31): n stands for inosine
uuggggugcugaugaggccguuaggccgaangaugcuu

SEQ ID NO: 16268 - RNA, 38 nt, Artificial Sequence
  Description of Artificial Sequence:  Enzymatic Nucleic Acid
  misc_feature (31)..(31): n stands for inosine
aguuggggcugaugaggccguuaggccgaanuggaugc

SEQ ID NO: 16269 - RNA, 38 nt, Artificial Sequence
  Description of Artificial Sequence:  Enzymatic Nucleic Acid
  misc_feature (31)..(31): n stands for inosine
ggaguuggcugaugaggccguuaggccgaanuguggau

SEQ ID NO: 16270 - RNA, 38 nt, Artificial Sequence
  Description of Artificial Sequence:  Enzymatic Nucleic Acid
  misc_feature (31)..(31): n stands for inosine
gggaguugcugaugaggccguuaggccgaangugugga

SEQ ID NO: 16271 - RNA, 38 nt, Artificial Sequence
  Description of Artificial Sequence:  Enzymatic Nucleic Acid
  misc_feature (31)..(31): n stands for inosine
cgggaguucugaugaggccguuaggccgaanggugugg

SEQ ID NO: 16272 - RNA, 38 nt, Artificial Sequence
  Description of Artificial Sequence:  Enzymatic Nucleic Acid
  misc_feature (31)..(31): n stands for inosine
ccgggagucugaugaggccguuaggccgaangggugug

SEQ ID NO: 16273 - RNA, 38 nt, Artificial Sequence
  Description of Artificial Sequence:  Enzymatic Nucleic Acid
  misc_feature (31)..(31): n stands for inosine
uguccgggcugaugaggccguuaggccgaanuuggggu

SEQ ID NO: 16274 - RNA, 38 nt, Artificial Sequence
  Description of Artificial Sequence:  Enzymatic Nucleic Acid
  misc_feature (31)..(31): n stands for inosine
gauguccgcugaugaggccguuaggccgaanaguuggg

SEQ ID NO: 16275 - RNA, 38 nt, Artificial Sequence
  Description of Artificial Sequence:  Enzymatic Nucleic Acid
  misc_feature (31)..(31): n stands for inosine
ugaugucccugaugaggccguuaggccgaangaguugg

SEQ ID NO: 16276 - RNA, 38 nt, Artificial Sequence
  Description of Artificial Sequence:  Enzymatic Nucleic Acid
  misc_feature (31)..(31): n stands for inosine
ucaugugacugaugaggccguuaggccgaanuccggga

SEQ ID NO: 16277 - RNA, 38 nt, Artificial Sequence
  Description of Artificial Sequence:  Enzymatic Nucleic Acid
  misc_feature (31)..(31): n stands for inosine
cucucaugcugaugaggccguuaggccgaanauguccg

SEQ ID NO: 16278 - RNA, 38 nt, Artificial Sequence
  Description of Artificial Sequence:  Enzymatic Nucleic Acid
  misc_feature (31)..(31): n stands for inosine
accucucacugaugaggccguuaggccgaanugauguc

SEQ ID NO: 16279 - RNA, 38 nt, Artificial Sequence
  Description of Artificial Sequence:  Enzymatic Nucleic Acid
  misc_feature (31)..(31): n stands for inosine
aucugagccugaugaggccguuaggccgaanaccucuc

SEQ ID NO: 16280 - RNA, 38 nt, Artificial Sequence
  Description of Artificial Sequence:  Enzymatic Nucleic Acid
  misc_feature (31)..(31): n stands for inosine
aaaaucugcugaugaggccguuaggccgaancagaccu

SEQ ID NO: 16281 - RNA, 38 nt, Artificial Sequence
  Description of Artificial Sequence:  Enzymatic Nucleic Acid
  misc_feature (31)..(31): n stands for inosine
ucaaaauccugaugaggccguuaggccgaanagcagac

SEQ ID NO: 16282 - RNA, 38 nt, Artificial Sequence
  Description of Artificial Sequence:  Enzymatic Nucleic Acid
  misc_feature (31)..(31): n stands for inosine
ugguggaacugaugaggccguuaggccgaanaacaaca

SEQ ID NO: 16283 - RNA, 38 nt, Artificial Sequence
  Description of Artificial Sequence:  Enzymatic Nucleic Acid
  misc_feature (31)..(31): n stands for inosine
cugcuggucugaugaggccguuaggccgaanaaagaac

SEQ ID NO: 16284 - RNA, 38 nt, Artificial Sequence
  Description of Artificial Sequence:  Enzymatic Nucleic Acid
  misc_feature (31)..(31): n stands for inosine
ccugcuggcugaugaggccguuaggccgaangaaagaa

SEQ ID NO: 16285 - RNA, 38 nt, Artificial Sequence
  Description of Artificial Sequence:  Enzymatic Nucleic Acid
  misc_feature (31)..(31): n stands for inosine
uuccugcucugaugaggccguuaggccgaanuggaaag

SEQ ID NO: 16286 - RNA, 38 nt, Artificial Sequence
  Description of Artificial Sequence:  Enzymatic Nucleic Acid
  misc_feature (31)..(31): n stands for inosine
cuuccugccugaugaggccguuaggccgaanguggaaa

SEQ ID NO: 16287 - RNA, 38 nt, Artificial Sequence
  Description of Artificial Sequence:  Enzymatic Nucleic Acid
  misc_feature (31)..(31): n stands for inosine
cuacuucccugaugaggccguuaggccgaancuggugg

SEQ ID NO: 16288 - RNA, 38 nt, Artificial Sequence
  Description of Artificial Sequence:  Enzymatic Nucleic Acid
  misc_feature (31)..(31): n stands for inosine
ucaaaugccugaugaggccguuaggccgaancuacuuc

SEQ ID NO: 16289 - RNA, 38 nt, Artificial Sequence
  Description of Artificial Sequence:  Enzymatic Nucleic Acid
  misc_feature (31)..(31): n stands for inosine
aaaucaaacugaugaggccguuaggccgaancggcuac

SEQ ID NO: 16290 - RNA, 38 nt, Artificial Sequence
  Description of Artificial Sequence:  Enzymatic Nucleic Acid
  misc_feature (31)..(31): n stands for inosine
ugucgaaacugaugaggccguuaggccgaanaaaauca

SEQ ID NO: 16291 - RNA, 38 nt, Artificial Sequence
  Description of Artificial Sequence:  Enzymatic Nucleic Acid
  misc_feature (31)..(31): n stands for inosine
uuuucugucugaugaggccguuaggccgaanucgaaau

SEQ ID NO: 16292 - RNA, 38 nt, Artificial Sequence
  Description of Artificial Sequence:  Enzymatic Nucleic Acid
  misc_feature (31)..(31): n stands for inosine
ccuuuuuccugaugaggccguuaggccgaanuugucga

SEQ ID NO: 16293 - RNA, 38 nt, Artificial Sequence
  Description of Artificial Sequence:  Enzymatic Nucleic Acid
  misc_feature (31)..(31): n stands for inosine
caguccgacugaugaggccguuaggccgaanuccuuuu

SEQ ID NO: 16294 - RNA, 38 nt, Artificial Sequence
  Description of Artificial Sequence:  Enzymatic Nucleic Acid
  misc_feature (31)..(31): n stands for inosine
gcaguccgcugaugaggccguuaggccgaanguccuuu

SEQ ID NO: 16295 - RNA, 38 nt, Artificial Sequence
  Description of Artificial Sequence:  Enzymatic Nucleic Acid
  misc_feature (31)..(31): n stands for inosine
cucccugccugaugaggccguuaggccgaanuccgagg

SEQ ID NO: 16296 - RNA, 38 nt, Artificial Sequence
  Description of Artificial Sequence:  Enzymatic Nucleic Acid
  misc_feature (31)..(31): n stands for inosine
uggcuccccugaugaggccguuaggccgaancaguccg

SEQ ID NO: 16297 - RNA, 38 nt, Artificial Sequence
  Description of Artificial Sequence:  Enzymatic Nucleic Acid
  misc_feature (31)..(31): n stands for inosine
gaagagcucugaugaggccguuaggccgaancucccug

SEQ ID NO: 16298 - RNA, 38 nt, Artificial Sequence
  Description of Artificial Sequence:  Enzymatic Nucleic Acid
  misc_feature (31)..(31): n stands for inosine
agaagagccugaugaggccguuaggccgaangcucccu

SEQ ID NO: 16299 - RNA, 38 nt, Artificial Sequence
  Description of Artificial Sequence:  Enzymatic Nucleic Acid
  misc_feature (31)..(31): n stands for inosine
ccuagaagcugaugaggccguuaggccgaancuggcuc

SEQ ID NO: 16300 - RNA, 38 nt, Artificial Sequence
  Description of Artificial Sequence:  Enzymatic Nucleic Acid
  misc_feature (31)..(31): n stands for inosine
agccuagacugaugaggccguuaggccgaanagcuggc

SEQ ID NO: 16301 - RNA, 38 nt, Artificial Sequence
  Description of Artificial Sequence:  Enzymatic Nucleic Acid
  misc_feature (31)..(31): n stands for inosine
acaagccucugaugaggccguuaggccgaanaagagcu

SEQ ID NO: 16302 - RNA, 36 nt, Artificial Sequence
  Description of Artificial Sequence:  Enzymatic Nucleic Acid
gccagugauggcaugcacuaugcgcgagcaccuugc

SEQ ID NO: 16303 - RNA, 36 nt, Artificial Sequence
  Description of Artificial Sequence:  Enzymatic Nucleic Acid
cagggugauggcaugcacuaugcgcggacggccagc

SEQ ID NO: 16304 - RNA, 36 nt, Artificial Sequence
  Description of Artificial Sequence:  Enzymatic Nucleic Acid
ccacgugauggcaugcacuaugcgcgagagccacag

SEQ ID NO: 16305 - RNA, 36 nt, Artificial Sequence
  Description of Artificial Sequence:  Enzymatic Nucleic Acid
agaggugauggcaugcacuaugcgcgggcccggguc

SEQ ID NO: 16306 - RNA, 36 nt, Artificial Sequence
  Description of Artificial Sequence:  Enzymatic Nucleic Acid
cuaggugauggcaugcacuaugcgcgaaacccacag

SEQ ID NO: 16307 - RNA, 36 nt, Artificial Sequence
  Description of Artificial Sequence:  Enzymatic Nucleic Acid
cagauugauggcaugcacuaugcgcgaagagaaaca

SEQ ID NO: 16308 - RNA, 36 nt, Artificial Sequence
  Description of Artificial Sequence:  Enzymatic Nucleic Acid
cugggugauggcaugcacuaugcgcgagaucaagag

SEQ ID NO: 16309 - RNA, 36 nt, Artificial Sequence
  Description of Artificial Sequence:  Enzymatic Nucleic Acid
cccugugauggcaugcacuaugcgcgaaguaauuug

SEQ ID NO: 16310 - RNA, 36 nt, Artificial Sequence
  Description of Artificial Sequence:  Enzymatic Nucleic Acid
uugcuugauggcaugcacuaugcgcgacugccacuc

SEQ ID NO: 16311 - RNA, 36 nt, Artificial Sequence
  Description of Artificial Sequence:  Enzymatic Nucleic Acid
ucaguugauggcaugcacuaugcgcgaccuccaccc

SEQ ID NO: 16312 - RNA, 36 nt, Artificial Sequence
  Description of Artificial Sequence:  Enzymatic Nucleic Acid
gcacuugauggcaugcacuaugcgcgagucaccucc

SEQ ID NO: 16313 - RNA, 36 nt, Artificial Sequence
  Description of Artificial Sequence:  Enzymatic Nucleic Acid
cgcugugauggcaugcacuaugcgcgacucagucac

SEQ ID NO: 16314 - RNA, 36 nt, Artificial Sequence
  Description of Artificial Sequence:  Enzymatic Nucleic Acid
gccauugauggcaugcacuaugcgcggcugcacuca

SEQ ID NO: 16315 - RNA, 36 nt, Artificial Sequence
  Description of Artificial Sequence:  Enzymatic Nucleic Acid
ccgauugauggcaugcacuaugcgcgacuuuuggaa

SEQ ID NO: 16316 - RNA, 36 nt, Artificial Sequence
  Description of Artificial Sequence:  Enzymatic Nucleic Acid
aguguugauggcaugcacuaugcgcgauuuccgauc

SEQ ID NO: 16317 - RNA, 36 nt, Artificial Sequence
  Description of Artificial Sequence:  Enzymatic Nucleic Acid
agaagugauggcaugcacuaugcgcgacuuguaggc

SEQ ID NO: 16318 - RNA, 36 nt, Artificial Sequence
  Description of Artificial Sequence:  Enzymatic Nucleic Acid
caaguugauggcaugcacuaugcgcgaguuucccgg

SEQ ID NO: 16319 - RNA, 36 nt, Artificial Sequence
  Description of Artificial Sequence:  Enzymatic Nucleic Acid
agaagugauggcaugcacuaugcgcgaauaaaugga

SEQ ID NO: 16320 - RNA, 36 nt, Artificial Sequence
  Description of Artificial Sequence:  Enzymatic Nucleic Acid
uugguugauggcaugcacuaugcgcgacuaacagaa

SEQ ID NO: 16321 - RNA, 36 nt, Artificial Sequence
  Description of Artificial Sequence:  Enzymatic Nucleic Acid
guucuugauggcaugcacuaugcgcgaguaauguac

SEQ ID NO: 16322 - RNA, 36 nt, Artificial Sequence
  Description of Artificial Sequence:  Enzymatic Nucleic Acid
ggaauugauggcaugcacuaugcgcgaccacaguuu

SEQ ID NO: 16323 - RNA, 36 nt, Artificial Sequence
  Description of Artificial Sequence:  Enzymatic Nucleic Acid
ucuugugauggcaugcacuaugcgcgacaaagugac

SEQ ID NO: 16324 - RNA, 36 nt, Artificial Sequence
  Description of Artificial Sequence:  Enzymatic Nucleic Acid
accauugauggcaugcacuaugcgcgaggaacaaau

SEQ ID NO: 16325 - RNA, 36 nt, Artificial Sequence
  Description of Artificial Sequence:  Enzymatic Nucleic Acid
cugauugauggcaugcacuaugcgcgauguagcugg

SEQ ID NO: 16326 - RNA, 36 nt, Artificial Sequence
  Description of Artificial Sequence:  Enzymatic Nucleic Acid
gccagugauggcaugcacuaugcgcgauagcugauc

SEQ ID NO: 16327 - RNA, 36 nt, Artificial Sequence
  Description of Artificial Sequence:  Enzymatic Nucleic Acid
ugcuuugauggcaugcacuaugcgcgacagaagacc

SEQ ID NO: 16328 - RNA, 36 nt, Artificial Sequence
  Description of Artificial Sequence:  Enzymatic Nucleic Acid
uucauugauggcaugcacuaugcgcgauuaauuuuu

SEQ ID NO: 16329 - RNA, 36 nt, Artificial Sequence
  Description of Artificial Sequence:  Enzymatic Nucleic Acid
acuuuugauggcaugcacuaugcgcgaucauuaauu

SEQ ID NO: 16330 - RNA, 36 nt, Artificial Sequence
  Description of Artificial Sequence:  Enzymatic Nucleic Acid
cacauugauggcaugcacuaugcgcgauaaauccua

SEQ ID NO: 16331 - RNA, 36 nt, Artificial Sequence
  Description of Artificial Sequence:  Enzymatic Nucleic Acid
ggacuugauggcaugcacuaugcgcgagaaccacau

SEQ ID NO: 16332 - RNA, 36 nt, Artificial Sequence
  Description of Artificial Sequence:  Enzymatic Nucleic Acid
uaguuugauggcaugcacuaugcgcgaauuccauga

SEQ ID NO: 16333 - RNA, 36 nt, Artificial Sequence
  Description of Artificial Sequence:  Enzymatic Nucleic Acid
uaguuugauggcaugcacuaugcgcgaguucuugcu

SEQ ID NO: 16334 - RNA, 36 nt, Artificial Sequence
  Description of Artificial Sequence:  Enzymatic Nucleic Acid
gaaguugauggcaugcacuaugcgcgaauccccaca

SEQ ID NO: 16335 - RNA, 36 nt, Artificial Sequence
  Description of Artificial Sequence:  Enzymatic Nucleic Acid
ugcuuugauggcaugcacuaugcgcggaagaagggu

SEQ ID NO: 16336 - RNA, 36 nt, Artificial Sequence
  Description of Artificial Sequence:  Enzymatic Nucleic Acid
ggucuugauggcaugcacuaugcgcggguuuacaag

SEQ ID NO: 16337 - RNA, 36 nt, Artificial Sequence
  Description of Artificial Sequence:  Enzymatic Nucleic Acid
caucuugauggcaugcacuaugcgcgacucccagac

SEQ ID NO: 16338 - RNA, 36 nt, Artificial Sequence
  Description of Artificial Sequence:  Enzymatic Nucleic Acid
uucuuugauggcaugcacuaugcgcgaucucacucc

SEQ ID NO: 16339 - RNA, 36 nt, Artificial Sequence
  Description of Artificial Sequence:  Enzymatic Nucleic Acid
gugcuugauggcaugcacuaugcgcgaaaaauuucu

SEQ ID NO: 16340 - RNA, 36 nt, Artificial Sequence
  Description of Artificial Sequence:  Enzymatic Nucleic Acid
uugguugauggcaugcacuaugcgcgacuccggguu

SEQ ID NO: 16341 - RNA, 36 nt, Artificial Sequence
  Description of Artificial Sequence:  Enzymatic Nucleic Acid
ugcugugauggcaugcacuaugcgcgacagguguac

SEQ ID NO: 16342 - RNA, 36 nt, Artificial Sequence
  Description of Artificial Sequence:  Enzymatic Nucleic Acid
gucauugauggcaugcacuaugcgcgagcccacugg

SEQ ID NO: 16343 - RNA, 36 nt, Artificial Sequence
  Description of Artificial Sequence:  Enzymatic Nucleic Acid
uugguugauggcaugcacuaugcgcgaucagcccac

SEQ ID NO: 16344 - RNA, 36 nt, Artificial Sequence
  Description of Artificial Sequence:  Enzymatic Nucleic Acid
uuuuuugauggcaugcacuaugcgcgauggacccug

SEQ ID NO: 16345 - RNA, 36 nt, Artificial Sequence
  Description of Artificial Sequence:  Enzymatic Nucleic Acid
aaaagugauggcaugcacuaugcgcgaacaaaaggu

SEQ ID NO: 16346 - RNA, 36 nt, Artificial Sequence
  Description of Artificial Sequence:  Enzymatic Nucleic Acid
cuucgugauggcaugcacuaugcgcgagggauucug

SEQ ID NO: 16347 - RNA, 36 nt, Artificial Sequence
  Description of Artificial Sequence:  Enzymatic Nucleic Acid
uacuuugauggcaugcacuaugcgcggcagggauuc

SEQ ID NO: 16348 - RNA, 36 nt, Artificial Sequence
  Description of Artificial Sequence:  Enzymatic Nucleic Acid
ggacuugauggcaugcacuaugcgcgaagggguauu

SEQ ID NO: 16349 - RNA, 36 nt, Artificial Sequence
  Description of Artificial Sequence:  Enzymatic Nucleic Acid
aucguugauggcaugcacuaugcgcgaguacaugcc

SEQ ID NO: 16350 - RNA, 36 nt, Artificial Sequence
  Description of Artificial Sequence:  Enzymatic Nucleic Acid
auaauugauggcaugcacuaugcgcggucaguacau

SEQ ID NO: 16351 - RNA, 36 nt, Artificial Sequence
  Description of Artificial Sequence:  Enzymatic Nucleic Acid
ucacuugauggcaugcacuaugcgcgacuuccauaa

SEQ ID NO: 16352 - RNA, 36 nt, Artificial Sequence
  Description of Artificial Sequence:  Enzymatic Nucleic Acid
ucuuuugauggcaugcacuaugcgcgacucacuucc

SEQ ID NO: 16353 - RNA, 36 nt, Artificial Sequence
  Description of Artificial Sequence:  Enzymatic Nucleic Acid
uuucuugauggcaugcacuaugcgcgaccaaucugg

SEQ ID NO: 16354 - RNA, 36 nt, Artificial Sequence
  Description of Artificial Sequence:  Enzymatic Nucleic Acid
gucagugauggcaugcacuaugcgcgguuugagugg

SEQ ID NO: 16355 - RNA, 36 nt, Artificial Sequence
  Description of Artificial Sequence:  Enzymatic Nucleic Acid
cauguugauggcaugcacuaugcgcgagcguuugag

SEQ ID NO: 16356 - RNA, 36 nt, Artificial Sequence
  Description of Artificial Sequence:  Enzymatic Nucleic Acid
aauggugauggcaugcacuaugcgcgauagaccgua

SEQ ID NO: 16357 - RNA, 36 nt, Artificial Sequence
  Description of Artificial Sequence:  Enzymatic Nucleic Acid
ugaugugauggcaugcacuaugcgcggggggaggaa

SEQ ID NO: 16358 - RNA, 36 nt, Artificial Sequence
  Description of Artificial Sequence:  Enzymatic Nucleic Acid
uggcgugauggcaugcacuaugcgcgacucuuccuc

SEQ ID NO: 16359 - RNA, 36 nt, Artificial Sequence
  Description of Artificial Sequence:  Enzymatic Nucleic Acid
guuggugauggcaugcacuaugcgcggcacucuucc

SEQ ID NO: 16360 - RNA, 36 nt, Artificial Sequence
  Description of Artificial Sequence:  Enzymatic Nucleic Acid
gggcuugauggcaugcacuaugcgcgguuggcgcac

SEQ ID NO: 16361 - RNA, 36 nt, Artificial Sequence
  Description of Artificial Sequence:  Enzymatic Nucleic Acid
uuuguugauggcaugcacuaugcgcgacugagacag

SEQ ID NO: 16362 - RNA, 36 nt, Artificial Sequence
  Description of Artificial Sequence:  Enzymatic Nucleic Acid
uucuuugauggcaugcacuaugcgcgacaaggguau

SEQ ID NO: 16363 - RNA, 36 nt, Artificial Sequence
  Description of Artificial Sequence:  Enzymatic Nucleic Acid
aacuuugauggcaugcacuaugcgcgaauuuuauuu

SEQ ID NO: 16364 - RNA, 36 nt, Artificial Sequence
  Description of Artificial Sequence:  Enzymatic Nucleic Acid
uagagugauggcaugcacuaugcgcgaaauugauuu

SEQ ID NO: 16365 - RNA, 36 nt, Artificial Sequence
  Description of Artificial Sequence:  Enzymatic Nucleic Acid
uccuuugauggcaugcacuaugcgcgaauuagagca

SEQ ID NO: 16366 - RNA, 36 nt, Artificial Sequence
  Description of Artificial Sequence:  Enzymatic Nucleic Acid
cgcuuugauggcaugcacuaugcgcgacauuuguac

SEQ ID NO: 16367 - RNA, 36 nt, Artificial Sequence
  Description of Artificial Sequence:  Enzymatic Nucleic Acid
gagauugauggcaugcacuaugcgcgacccucucuc

SEQ ID NO: 16368 - RNA, 36 nt, Artificial Sequence
  Description of Artificial Sequence:  Enzymatic Nucleic Acid
cugguugauggcaugcacuaugcgcgacguggaagg

SEQ ID NO: 16369 - RNA, 36 nt, Artificial Sequence
  Description of Artificial Sequence:  Enzymatic Nucleic Acid
aauuuugauggcaugcacuaugcgcgaggaccccug

SEQ ID NO: 16370 - RNA, 36 nt, Artificial Sequence
  Description of Artificial Sequence:  Enzymatic Nucleic Acid
gguugugauggcaugcacuaugcgcgaaaguaauuu

SEQ ID NO: 16371 - RNA, 36 nt, Artificial Sequence
  Description of Artificial Sequence:  Enzymatic Nucleic Acid
cauguugauggcaugcacuaugcgcgagguugcaaa

SEQ ID NO: 16372 - RNA, 36 nt, Artificial Sequence
  Description of Artificial Sequence:  Enzymatic Nucleic Acid
ggcugugauggcaugcacuaugcgcgaugucagguu

SEQ ID NO: 16373 - RNA, 36 nt, Artificial Sequence
  Description of Artificial Sequence:  Enzymatic Nucleic Acid
cugcuugauggcaugcacuaugcgcgagugggcugc

SEQ ID NO: 16374 - RNA, 36 nt, Artificial Sequence
  Description of Artificial Sequence:  Enzymatic Nucleic Acid
cagugugauggcaugcacuaugcgcgaccacaaaga

SEQ ID NO: 16375 - RNA, 36 nt, Artificial Sequence
  Description of Artificial Sequence:  Enzymatic Nucleic Acid
gucugugauggcaugcacuaugcgcgagugcaccac

SEQ ID NO: 16376 - RNA, 36 nt, Artificial Sequence
  Description of Artificial Sequence:  Enzymatic Nucleic Acid
guucuugauggcaugcacuaugcgcgaaacguagau

SEQ ID NO: 16377 - RNA, 36 nt, Artificial Sequence
  Description of Artificial Sequence:  Enzymatic Nucleic Acid
auuggugauggcaugcacuaugcgcgagaggcugug

SEQ ID NO: 16378 - RNA, 36 nt, Artificial Sequence
  Description of Artificial Sequence:  Enzymatic Nucleic Acid
gugggugauggcaugcacuaugcgcgaacucuccca

SEQ ID NO: 16379 - RNA, 36 nt, Artificial Sequence
  Description of Artificial Sequence:  Enzymatic Nucleic Acid
ucuugugauggcaugcacuaugcgcgaaacaggugu

SEQ ID NO: 16380 - RNA, 36 nt, Artificial Sequence
  Description of Artificial Sequence:  Enzymatic Nucleic Acid
gcauuugauggcaugcacuaugcgcgaauuuccaaa

SEQ ID NO: 16381 - RNA, 36 nt, Artificial Sequence
  Description of Artificial Sequence:  Enzymatic Nucleic Acid
gguggugauggcaugcacuaugcgcgauucaauuuc

SEQ ID NO: 16382 - RNA, 36 nt, Artificial Sequence
  Description of Artificial Sequence:  Enzymatic Nucleic Acid
aauguugauggcaugcacuaugcgcgauuugugcua

SEQ ID NO: 16383 - RNA, 36 nt, Artificial Sequence
  Description of Artificial Sequence:  Enzymatic Nucleic Acid
augauugauggcaugcacuaugcgcgaaaaugucau

SEQ ID NO: 16384 - RNA, 36 nt, Artificial Sequence
  Description of Artificial Sequence:  Enzymatic Nucleic Acid
ggaugugauggcaugcacuaugcgcgauucuuaagc

SEQ ID NO: 16385 - RNA, 36 nt, Artificial Sequence
  Description of Artificial Sequence:  Enzymatic Nucleic Acid
uccugugauggcaugcacuaugcgcgaaggaugcau

SEQ ID NO: 16386 - RNA, 36 nt, Artificial Sequence
  Description of Artificial Sequence:  Enzymatic Nucleic Acid
caaggugauggcaugcacuaugcgcgagacauaguc

SEQ ID NO: 16387 - RNA, 36 nt, Artificial Sequence
  Description of Artificial Sequence:  Enzymatic Nucleic Acid
uugagugauggcaugcacuaugcgcgaaggcagaca

SEQ ID NO: 16388 - RNA, 36 nt, Artificial Sequence
  Description of Artificial Sequence:  Enzymatic Nucleic Acid
ccacgugauggcaugcacuaugcgcgaaugucuuuu

SEQ ID NO: 16389 - RNA, 36 nt, Artificial Sequence
  Description of Artificial Sequence:  Enzymatic Nucleic Acid
gugauugauggcaugcacuaugcgcggugggugcca

SEQ ID NO: 16390 - RNA, 36 nt, Artificial Sequence
  Description of Artificial Sequence:  Enzymatic Nucleic Acid
cuuguugauggcaugcacuaugcgcggucugauucu

SEQ ID NO: 16391 - RNA, 36 nt, Artificial Sequence
  Description of Artificial Sequence:  Enzymatic Nucleic Acid
gacuuugauggcaugcacuaugcgcggaugcuuucc

SEQ ID NO: 16392 - RNA, 36 nt, Artificial Sequence
  Description of Artificial Sequence:  Enzymatic Nucleic Acid
ccgugugauggcaugcacuaugcgcgaugagacuuc

SEQ ID NO: 16393 - RNA, 36 nt, Artificial Sequence
  Description of Artificial Sequence:  Enzymatic Nucleic Acid
ggucuugauggcaugcacuaugcgcgauuaucuuua

SEQ ID NO: 16394 - RNA, 36 nt, Artificial Sequence
  Description of Artificial Sequence:  Enzymatic Nucleic Acid
uccuuugauggcaugcacuaugcgcgaauacaaugc

SEQ ID NO: 16395 - RNA, 36 nt, Artificial Sequence
  Description of Artificial Sequence:  Enzymatic Nucleic Acid
cucugugauggcaugcacuaugcgcgggauagugag

SEQ ID NO: 16396 - RNA, 36 nt, Artificial Sequence
  Description of Artificial Sequence:  Enzymatic Nucleic Acid
uuccuugauggcaugcacuaugcgcgacucugcgga

SEQ ID NO: 16397 - RNA, 36 nt, Artificial Sequence
  Description of Artificial Sequence:  Enzymatic Nucleic Acid
gccuuugauggcaugcacuaugcgcgguccuccuuc

SEQ ID NO: 16398 - RNA, 36 nt, Artificial Sequence
  Description of Artificial Sequence:  Enzymatic Nucleic Acid
ccuggugauggcaugcacuaugcgcgagguguagag

SEQ ID NO: 16399 - RNA, 36 nt, Artificial Sequence
  Description of Artificial Sequence:  Enzymatic Nucleic Acid
cacugugauggcaugcacuaugcgcgaugccuggca

SEQ ID NO: 16400 - RNA, 36 nt, Artificial Sequence
  Description of Artificial Sequence:  Enzymatic Nucleic Acid
uuuugugauggcaugcacuaugcgcgacagccaaga

SEQ ID NO: 16401 - RNA, 36 nt, Artificial Sequence
  Description of Artificial Sequence:  Enzymatic Nucleic Acid
cugggugauggcaugcacuaugcgcgaccuucuauu

SEQ ID NO: 16402 - RNA, 36 nt, Artificial Sequence
  Description of Artificial Sequence:  Enzymatic Nucleic Acid
aaguuugauggcaugcacuaugcgcggucuuuuccu

SEQ ID NO: 16403 - RNA, 36 nt, Artificial Sequence
  Description of Artificial Sequence:  Enzymatic Nucleic Acid
accguugauggcaugcacuaugcgcggugccuacua

SEQ ID NO: 16404 - RNA, 36 nt, Artificial Sequence
  Description of Artificial Sequence:  Enzymatic Nucleic Acid
gcaauugauggcaugcacuaugcgcgaccgucgugc

SEQ ID NO: 16405 - RNA, 36 nt, Artificial Sequence
  Description of Artificial Sequence:  Enzymatic Nucleic Acid
cauggugauggcaugcacuaugcgcgaaucaccguc

SEQ ID NO: 16406 - RNA, 36 nt, Artificial Sequence
  Description of Artificial Sequence:  Enzymatic Nucleic Acid
gucuuugauggcaugcacuaugcgcgaguuccccuc

SEQ ID NO: 16407 - RNA, 36 nt, Artificial Sequence
  Description of Artificial Sequence:  Enzymatic Nucleic Acid
gaguuugauggcaugcacuaugcgcgaucuggaucc

SEQ ID NO: 16408 - RNA, 36 nt, Artificial Sequence
  Description of Artificial Sequence:  Enzymatic Nucleic Acid
auguuugauggcaugcacuaugcgcgauccaauggg

SEQ ID NO: 16409 - RNA, 36 nt, Artificial Sequence
  Description of Artificial Sequence:  Enzymatic Nucleic Acid
ucguuugauggcaugcacuaugcgcgacaauguuca

SEQ ID NO: 16410 - RNA, 36 nt, Artificial Sequence
  Description of Artificial Sequence:  Enzymatic Nucleic Acid
gcaguugauggcaugcacuaugcgcgguucacaaug

SEQ ID NO: 16411 - RNA, 36 nt, Artificial Sequence
  Description of Artificial Sequence:  Enzymatic Nucleic Acid
uaaggugauggcaugcacuaugcgcgagucguucac

SEQ ID NO: 16412 - RNA, 36 nt, Artificial Sequence
  Description of Artificial Sequence:  Enzymatic Nucleic Acid
ggcauugauggcaugcacuaugcgcgauaaggcagu

SEQ ID NO: 16413 - RNA, 36 nt, Artificial Sequence
  Description of Artificial Sequence:  Enzymatic Nucleic Acid
gcuggugauggcaugcacuaugcgcgaucauaaggc

SEQ ID NO: 16414 - RNA, 36 nt, Artificial Sequence
  Description of Artificial Sequence:  Enzymatic Nucleic Acid
agguuugauggcaugcacuaugcgcgagccggucuc

SEQ ID NO: 16415 - RNA, 36 nt, Artificial Sequence
  Description of Artificial Sequence:  Enzymatic Nucleic Acid
aaaggugauggcaugcacuaugcgcgaccacggcca

SEQ ID NO: 16416 - RNA, 36 nt, Artificial Sequence
  Description of Artificial Sequence:  Enzymatic Nucleic Acid
ugcuuugauggcaugcacuaugcgcgaaucucuugg

SEQ ID NO: 16417 - RNA, 36 nt, Artificial Sequence
  Description of Artificial Sequence:  Enzymatic Nucleic Acid
aaaggugauggcaugcacuaugcgcgaucugcuuca

SEQ ID NO: 16418 - RNA, 36 nt, Artificial Sequence
  Description of Artificial Sequence:  Enzymatic Nucleic Acid
cuuguugauggcaugcacuaugcgcgaauuccaaag

SEQ ID NO: 16419 - RNA, 36 nt, Artificial Sequence
  Description of Artificial Sequence:  Enzymatic Nucleic Acid
uccugugauggcaugcacuaugcgcgaaguugcugu

SEQ ID NO: 16420 - RNA, 36 nt, Artificial Sequence
  Description of Artificial Sequence:  Enzymatic Nucleic Acid
ucuuuugauggcaugcacuaugcgcgaacauuuuga

SEQ ID NO: 16421 - RNA, 36 nt, Artificial Sequence
  Description of Artificial Sequence:  Enzymatic Nucleic Acid
augcuugauggcaugcacuaugcgcgacuguguguu

SEQ ID NO: 16422 - RNA, 36 nt, Artificial Sequence
  Description of Artificial Sequence:  Enzymatic Nucleic Acid
gagcuugauggcaugcacuaugcgcggaugcucacu

SEQ ID NO: 16423 - RNA, 36 nt, Artificial Sequence
  Description of Artificial Sequence:  Enzymatic Nucleic Acid
gaguuugauggcaugcacuaugcgcgagacaugaga

SEQ ID NO: 16424 - RNA, 36 nt, Artificial Sequence
  Description of Artificial Sequence:  Enzymatic Nucleic Acid
acaggugauggcaugcacuaugcgcgaccuagaagg

SEQ ID NO: 16425 - RNA, 36 nt, Artificial Sequence
  Description of Artificial Sequence:  Enzymatic Nucleic Acid
acaauugauggcaugcacuaugcgcgaccaugagug

SEQ ID NO: 16426 - RNA, 36 nt, Artificial Sequence
  Description of Artificial Sequence:  Enzymatic Nucleic Acid
auuugugauggcaugcacuaugcgcgagaauuccac

SEQ ID NO: 16427 - RNA, 36 nt, Artificial Sequence
  Description of Artificial Sequence:  Enzymatic Nucleic Acid
cuccuugauggcaugcacuaugcgcgagguaagugg

SEQ ID NO: 16428 - RNA, 36 nt, Artificial Sequence
  Description of Artificial Sequence:  Enzymatic Nucleic Acid
aaauuugauggcaugcacuaugcgcgauuucucuug

SEQ ID NO: 16429 - RNA, 36 nt, Artificial Sequence
  Description of Artificial Sequence:  Enzymatic Nucleic Acid
ggaauugauggcaugcacuaugcgcggugccccuuu

SEQ ID NO: 16430 - RNA, 36 nt, Artificial Sequence
  Description of Artificial Sequence:  Enzymatic Nucleic Acid
cguuuugauggcaugcacuaugcgcgagauccacag

SEQ ID NO: 16431 - RNA, 36 nt, Artificial Sequence
  Description of Artificial Sequence:  Enzymatic Nucleic Acid
ccaagugauggcaugcacuaugcgcggccguuucag

SEQ ID NO: 16432 - RNA, 36 nt, Artificial Sequence
  Description of Artificial Sequence:  Enzymatic Nucleic Acid
uacauugauggcaugcacuaugcgcgacugagggac

SEQ ID NO: 16433 - RNA, 36 nt, Artificial Sequence
  Description of Artificial Sequence:  Enzymatic Nucleic Acid
aucuuugauggcaugcacuaugcgcgaggagcuucc

SEQ ID NO: 16434 - RNA, 36 nt, Artificial Sequence
  Description of Artificial Sequence:  Enzymatic Nucleic Acid
aagguugauggcaugcacuaugcgcgaggaaguccu

SEQ ID NO: 16435 - RNA, 36 nt, Artificial Sequence
  Description of Artificial Sequence:  Enzymatic Nucleic Acid
uuucgugauggcaugcacuaugcgcggaugccaaga

SEQ ID NO: 16436 - RNA, 36 nt, Artificial Sequence
  Description of Artificial Sequence:  Enzymatic Nucleic Acid
acuuuugauggcaugcacuaugcgcggcgaugccaa

SEQ ID NO: 16437 - RNA, 36 nt, Artificial Sequence
  Description of Artificial Sequence:  Enzymatic Nucleic Acid
uauuuugauggcaugcacuaugcgcggugccgccag

SEQ ID NO: 16438 - RNA, 36 nt, Artificial Sequence
  Description of Artificial Sequence:  Enzymatic Nucleic Acid
aaaguugauggcaugcacuaugcgcgacagauuuua

SEQ ID NO: 16439 - RNA, 36 nt, Artificial Sequence
  Description of Artificial Sequence:  Enzymatic Nucleic Acid
gcgagugauggcaugcacuaugcgcgaucuccuuuu

SEQ ID NO: 16440 - RNA, 36 nt, Artificial Sequence
  Description of Artificial Sequence:  Enzymatic Nucleic Acid
ggaggugauggcaugcacuaugcgcggagcaucucc

SEQ ID NO: 16441 - RNA, 36 nt, Artificial Sequence
  Description of Artificial Sequence:  Enzymatic Nucleic Acid
cauuuugauggcaugcacuaugcgcgaaagggaggc

SEQ ID NO: 16442 - RNA, 36 nt, Artificial Sequence
  Description of Artificial Sequence:  Enzymatic Nucleic Acid
ucuguugauggcaugcacuaugcgcgaaaaauuguu

SEQ ID NO: 16443 - RNA, 36 nt, Artificial Sequence
  Description of Artificial Sequence:  Enzymatic Nucleic Acid
gacguugauggcaugcacuaugcgcgacucuggauu

SEQ ID NO: 16444 - RNA, 36 nt, Artificial Sequence
  Description of Artificial Sequence:  Enzymatic Nucleic Acid
cacagugauggcaugcacuaugcgcgaaaacaccaa

SEQ ID NO: 16445 - RNA, 36 nt, Artificial Sequence
  Description of Artificial Sequence:  Enzymatic Nucleic Acid
agaagugauggcaugcacuaugcgcgaccuaaggaa

SEQ ID NO: 16446 - RNA, 36 nt, Artificial Sequence
  Description of Artificial Sequence:  Enzymatic Nucleic Acid
uucauugauggcaugcacuaugcgcgaaucuuuacc

SEQ ID NO: 16447 - RNA, 36 nt, Artificial Sequence
  Description of Artificial Sequence:  Enzymatic Nucleic Acid
uucuuugauggcaugcacuaugcgcgaucaaucuuu

SEQ ID NO: 16448 - RNA, 36 nt, Artificial Sequence
  Description of Artificial Sequence:  Enzymatic Nucleic Acid
ucaauugauggcaugcacuaugcgcggccuacaaaa

SEQ ID NO: 16449 - RNA, 36 nt, Artificial Sequence
  Description of Artificial Sequence:  Enzymatic Nucleic Acid
ucuuuugauggcaugcacuaugcgcgaaucgccuac

SEQ ID NO: 16450 - RNA, 36 nt, Artificial Sequence
  Description of Artificial Sequence:  Enzymatic Nucleic Acid
gcccuugauggcaugcacuaugcgcgauucuaguuc

SEQ ID NO: 16451 - RNA, 36 nt, Artificial Sequence
  Description of Artificial Sequence:  Enzymatic Nucleic Acid
auaauugauggcaugcacuaugcgcgaggggcccuc

SEQ ID NO: 16452 - RNA, 36 nt, Artificial Sequence
  Description of Artificial Sequence:  Enzymatic Nucleic Acid
uccagugauggcaugcacuaugcgcgauggucuggu

SEQ ID NO: 16453 - RNA, 36 nt, Artificial Sequence
  Description of Artificial Sequence:  Enzymatic Nucleic Acid
gcuugugauggcaugcacuaugcgcgaagagauuuc

SEQ ID NO: 16454 - RNA, 36 nt, Artificial Sequence
  Description of Artificial Sequence:  Enzymatic Nucleic Acid
cugagugauggcaugcacuaugcgcgauuagcuugc

SEQ ID NO: 16455 - RNA, 36 nt, Artificial Sequence
  Description of Artificial Sequence:  Enzymatic Nucleic Acid
gauauugauggcaugcacuaugcgcgggaagaacaa

SEQ ID NO: 16456 - RNA, 36 nt, Artificial Sequence
  Description of Artificial Sequence:  Enzymatic Nucleic Acid
augcuugauggcaugcacuaugcgcgaaagucucug

SEQ ID NO: 16457 - RNA, 36 nt, Artificial Sequence
  Description of Artificial Sequence:  Enzymatic Nucleic Acid
guaggugauggcaugcacuaugcgcgagagagaguc

SEQ ID NO: 16458 - RNA, 36 nt, Artificial Sequence
  Description of Artificial Sequence:  Enzymatic Nucleic Acid
gggguugauggcaugcacuaugcgcgacauacuucc

SEQ ID NO: 16459 - RNA, 36 nt, Artificial Sequence
  Description of Artificial Sequence:  Enzymatic Nucleic Acid
guuguugauggcaugcacuaugcgcgauaauggaau

SEQ ID NO: 16460 - RNA, 36 nt, Artificial Sequence
  Description of Artificial Sequence:  Enzymatic Nucleic Acid
uucugugauggcaugcacuaugcgcgagauacugac

SEQ ID NO: 16461 - RNA, 36 nt, Artificial Sequence
  Description of Artificial Sequence:  Enzymatic Nucleic Acid
ucuuuugauggcaugcacuaugcgcggcuuacuguu

SEQ ID NO: 16462 - RNA, 36 nt, Artificial Sequence
  Description of Artificial Sequence:  Enzymatic Nucleic Acid
acacuugauggcaugcacuaugcgcgacaggccggc

SEQ ID NO: 16463 - RNA, 36 nt, Artificial Sequence
  Description of Artificial Sequence:  Enzymatic Nucleic Acid
aucuuugauggcaugcacuaugcgcgaaauguuuuu

SEQ ID NO: 16464 - RNA, 36 nt, Artificial Sequence
  Description of Artificial Sequence:  Enzymatic Nucleic Acid
guuguugauggcaugcacuaugcgcgaucugggauu

SEQ ID NO: 16465 - RNA, 36 nt, Artificial Sequence
  Description of Artificial Sequence:  Enzymatic Nucleic Acid
ugaggugauggcaugcacuaugcgcgaagaaccaua

SEQ ID NO: 16466 - RNA, 36 nt, Artificial Sequence
  Description of Artificial Sequence:  Enzymatic Nucleic Acid
guuuuugauggcaugcacuaugcgcgagcucuucug

SEQ ID NO: 16467 - RNA, 36 nt, Artificial Sequence
  Description of Artificial Sequence:  Enzymatic Nucleic Acid
cugggugauggcaugcacuaugcgcgaccauuccac

SEQ ID NO: 16468 - RNA, 36 nt, Artificial Sequence
  Description of Artificial Sequence:  Enzymatic Nucleic Acid
gccuuugauggcaugcacuaugcgcgagaugccaca

SEQ ID NO: 16469 - RNA, 36 nt, Artificial Sequence
  Description of Artificial Sequence:  Enzymatic Nucleic Acid
gucauugauggcaugcacuaugcgcgggagugauau

SEQ ID NO: 16470 - RNA, 36 nt, Artificial Sequence
  Description of Artificial Sequence:  Enzymatic Nucleic Acid
uguguugauggcaugcacuaugcgcgaucggaguga

SEQ ID NO: 16471 - RNA, 36 nt, Artificial Sequence
  Description of Artificial Sequence:  Enzymatic Nucleic Acid
uuccuugauggcaugcacuaugcgcgacuggaguac

SEQ ID NO: 16472 - RNA, 36 nt, Artificial Sequence
  Description of Artificial Sequence:  Enzymatic Nucleic Acid
ucuauugauggcaugcacuaugcgcgagcuuuaaaa

SEQ ID NO: 16473 - RNA, 36 nt, Artificial Sequence
  Description of Artificial Sequence:  Enzymatic Nucleic Acid
guuugugauggcaugcacuaugcgcgacuccaaucu

SEQ ID NO: 16474 - RNA, 36 nt, Artificial Sequence
  Description of Artificial Sequence:  Enzymatic Nucleic Acid
cguguugauggcaugcacuaugcgcgaggcuggaga

SEQ ID NO: 16475 - RNA, 36 nt, Artificial Sequence
  Description of Artificial Sequence:  Enzymatic Nucleic Acid
gagcuugauggcaugcacuaugcgcgaguguggucc

SEQ ID NO: 16476 - RNA, 36 nt, Artificial Sequence
  Description of Artificial Sequence:  Enzymatic Nucleic Acid
ccucuugauggcaugcacuaugcgcgaugugauguc

SEQ ID NO: 16477 - RNA, 36 nt, Artificial Sequence
  Description of Artificial Sequence:  Enzymatic Nucleic Acid
cugagugauggcaugcacuaugcgcgagaccucuca

SEQ ID NO: 16478 - RNA, 36 nt, Artificial Sequence
  Description of Artificial Sequence:  Enzymatic Nucleic Acid
cacuuugauggcaugcacuaugcgcgaaaaucugag

SEQ ID NO: 16479 - RNA, 36 nt, Artificial Sequence
  Description of Artificial Sequence:  Enzymatic Nucleic Acid
aaaugugauggcaugcacuaugcgcgggcuacuucc

SEQ ID NO: 16480 - RNA, 36 nt, Artificial Sequence
  Description of Artificial Sequence:  Enzymatic Nucleic Acid
aaaauugauggcaugcacuaugcgcgaaaugcggcu

SEQ ID NO: 16481 - RNA, 36 nt, Artificial Sequence
  Description of Artificial Sequence:  Enzymatic Nucleic Acid
guuguugauggcaugcacuaugcgcggaaaugaaaa

SEQ ID NO: 16482 - RNA, 36 nt, Artificial Sequence
  Description of Artificial Sequence:  Enzymatic Nucleic Acid
cccugugauggcaugcacuaugcgcgaguccgaggu

SEQ ID NO: 16483 - DNA, 31 bp, Artificial Sequence
  Description of Artificial Sequence:  Enzymatic Nucleic Acid
gggaggagggctagctacaacgacgagagga

SEQ ID NO: 16484 - DNA, 31 bp, Artificial Sequence
  Description of Artificial Sequence:  Enzymatic Nucleic Acid
cgccgctgggctagctacaacgacggggagg

SEQ ID NO: 16485 - DNA, 31 bp, Artificial Sequence
  Description of Artificial Sequence:  Enzymatic Nucleic Acid
cgccgccgggctagctacaacgatgccgggg

SEQ ID NO: 16486 - DNA, 31 bp, Artificial Sequence
  Description of Artificial Sequence:  Enzymatic Nucleic Acid
agccgccgggctagctacaacgacgctgccg

SEQ ID NO: 16487 - DNA, 31 bp, Artificial Sequence
  Description of Artificial Sequence:  Enzymatic Nucleic Acid
ccgagccgggctagctacaacgacgccgctg

SEQ ID NO: 16488 - DNA, 31 bp, Artificial Sequence
  Description of Artificial Sequence:  Enzymatic Nucleic Acid
gctccgagggctagctacaacgacgccgccg

SEQ ID NO: 16489 - DNA, 31 bp, Artificial Sequence
  Description of Artificial Sequence:  Enzymatic Nucleic Acid
ggagcccgggctagctacaacgatccgagcc

SEQ ID NO: 16490 - DNA, 31 bp, Artificial Sequence
  Description of Artificial Sequence:  Enzymatic Nucleic Acid
ccccggagggctagctacaacgaccgctccg

SEQ ID NO: 16491 - DNA, 31 bp, Artificial Sequence
  Description of Artificial Sequence:  Enzymatic Nucleic Acid
cacccgagggctagctacaacgacccggagc

SEQ ID NO: 16492 - DNA, 31 bp, Artificial Sequence
  Description of Artificial Sequence:  Enzymatic Nucleic Acid
ccgctgcaggctagctacaacgaccgagccc

SEQ ID NO: 16493 - DNA, 31 bp, Artificial Sequence
  Description of Artificial Sequence:  Enzymatic Nucleic Acid
ggccgctgggctagctacaacgaacccgagc

SEQ ID NO: 16494 - DNA, 31 bp, Artificial Sequence
  Description of Artificial Sequence:  Enzymatic Nucleic Acid
gctggccgggctagctacaacgatgcacccg

SEQ ID NO: 16495 - DNA, 31 bp, Artificial Sequence
  Description of Artificial Sequence:  Enzymatic Nucleic Acid
cccgctggggctagctacaacgacgctgcac

SEQ ID NO: 16496 - DNA, 31 bp, Artificial Sequence
  Description of Artificial Sequence:  Enzymatic Nucleic Acid
caggcccgggctagctacaacgatggccgct

SEQ ID NO: 16497 - DNA, 31 bp, Artificial Sequence
  Description of Artificial Sequence:  Enzymatic Nucleic Acid
ccgccaggggctagctacaacgaccgctggc

SEQ ID NO: 16498 - DNA, 31 bp, Artificial Sequence
  Description of Artificial Sequence:  Enzymatic Nucleic Acid
cctcgccgggctagctacaacgacaggcccg

SEQ ID NO: 16499 - DNA, 31 bp, Artificial Sequence
  Description of Artificial Sequence:  Enzymatic Nucleic Acid
aatcctcgggctagctacaacgacgccaggc

SEQ ID NO: 16500 - DNA, 31 bp, Artificial Sequence
  Description of Artificial Sequence:  Enzymatic Nucleic Acid
ccgggtaaggctagctacaacgacctcgccg

SEQ ID NO: 16501 - DNA, 31 bp, Artificial Sequence
  Description of Artificial Sequence:  Enzymatic Nucleic Acid
tccccgggggctagctacaacgaaatcctcg

SEQ ID NO: 16502 - DNA, 31 bp, Artificial Sequence
  Description of Artificial Sequence:  Enzymatic Nucleic Acid
gacaaccaggctagctacaacgattccccgg

SEQ ID NO: 16503 - DNA, 31 bp, Artificial Sequence
  Description of Artificial Sequence:  Enzymatic Nucleic Acid
ggagacaaggctagctacaacgacacttccc

SEQ ID NO: 16504 - DNA, 31 bp, Artificial Sequence
  Description of Artificial Sequence:  Enzymatic Nucleic Acid
ccaggagaggctagctacaacgaaaccactt

SEQ ID NO: 16505 - DNA, 31 bp, Artificial Sequence
  Description of Artificial Sequence:  Enzymatic Nucleic Acid
ggctccagggctagctacaacgacaggagac

SEQ ID NO: 16506 - DNA, 31 bp, Artificial Sequence
  Description of Artificial Sequence:  Enzymatic Nucleic Acid
tctcgcggggctagctacaacgatccagcca

SEQ ID NO: 16507 - DNA, 31 bp, Artificial Sequence
  Description of Artificial Sequence:  Enzymatic Nucleic Acid
ccgtctcgggctagctacaacgaggctccag

SEQ ID NO: 16508 - DNA, 31 bp, Artificial Sequence
  Description of Artificial Sequence:  Enzymatic Nucleic Acid
agcgcccgggctagctacaacgactcgcggc

SEQ ID NO: 16509 - DNA, 31 bp, Artificial Sequence
  Description of Artificial Sequence:  Enzymatic Nucleic Acid
cctgagcgggctagctacaacgaccgtctcg

SEQ ID NO: 16510 - DNA, 31 bp, Artificial Sequence
  Description of Artificial Sequence:  Enzymatic Nucleic Acid
gccctgagggctagctacaacgagcccgtct

SEQ ID NO: 16511 - DNA, 31 bp, Artificial Sequence
  Description of Artificial Sequence:  Enzymatic Nucleic Acid
gccccgcgggctagctacaacgacctgagcg

SEQ ID NO: 16512 - DNA, 31 bp, Artificial Sequence
  Description of Artificial Sequence:  Enzymatic Nucleic Acid
cggccccgggctagctacaacgagccctgag

SEQ ID NO: 16513 - DNA, 31 bp, Artificial Sequence
  Description of Artificial Sequence:  Enzymatic Nucleic Acid
gccgccggggctagctacaacgacccgcgcc

SEQ ID NO: 16514 - DNA, 31 bp, Artificial Sequence
  Description of Artificial Sequence:  Enzymatic Nucleic Acid
cgccgccgggctagctacaacgacggccccg

SEQ ID NO: 16515 - DNA, 31 bp, Artificial Sequence
  Description of Artificial Sequence:  Enzymatic Nucleic Acid
gttcgccgggctagctacaacgacgccggcc

SEQ ID NO: 16516 - DNA, 31 bp, Artificial Sequence
  Description of Artificial Sequence:  Enzymatic Nucleic Acid
ctcgttcgggctagctacaacgacgccgccg

SEQ ID NO: 16517 - DNA, 31 bp, Artificial Sequence
  Description of Artificial Sequence:  Enzymatic Nucleic Acid
tcctctcgggctagctacaacgatcgccgcc

SEQ ID NO: 16518 - DNA, 31 bp, Artificial Sequence
  Description of Artificial Sequence:  Enzymatic Nucleic Acid
agagtccgggctagctacaacgacctctcgt

SEQ ID NO: 16519 - DNA, 31 bp, Artificial Sequence
  Description of Artificial Sequence:  Enzymatic Nucleic Acid
cgccagagggctagctacaacgaccgtcctc

SEQ ID NO: 16520 - DNA, 31 bp, Artificial Sequence
  Description of Artificial Sequence:  Enzymatic Nucleic Acid
cccggccgggctagctacaacgacagagtcc

SEQ ID NO: 16521 - DNA, 31 bp, Artificial Sequence
  Description of Artificial Sequence:  Enzymatic Nucleic Acid
cgacccggggctagctacaacgacgccagag

SEQ ID NO: 16522 - DNA, 31 bp, Artificial Sequence
  Description of Artificial Sequence:  Enzymatic Nucleic Acid
gccaacgaggctagctacaacgaccggccgc

SEQ ID NO: 16523 - DNA, 31 bp, Artificial Sequence
  Description of Artificial Sequence:  Enzymatic Nucleic Acid
ccggccaaggctagctacaacgagacccggc

SEQ ID NO: 16524 - DNA, 31 bp, Artificial Sequence
  Description of Artificial Sequence:  Enzymatic Nucleic Acid
tcccccggggctagctacaacgacaacgacc

SEQ ID NO: 16525 - DNA, 31 bp, Artificial Sequence
  Description of Artificial Sequence:  Enzymatic Nucleic Acid
tgcccgcgggctagctacaacgatcccccgg

SEQ ID NO: 16526 - DNA, 31 bp, Artificial Sequence
  Description of Artificial Sequence:  Enzymatic Nucleic Acid
ggtgcccgggctagctacaacgagctccccc

SEQ ID NO: 16527 - DNA, 31 bp, Artificial Sequence
  Description of Artificial Sequence:  Enzymatic Nucleic Acid
gcccggtgggctagctacaacgaccgcgctc

SEQ ID NO: 16528 - DNA, 31 bp, Artificial Sequence
  Description of Artificial Sequence:  Enzymatic Nucleic Acid
tcgcccggggctagctacaacgagcccgcgc

SEQ ID NO: 16529 - DNA, 31 bp, Artificial Sequence
  Description of Artificial Sequence:  Enzymatic Nucleic Acid
cctgctcgggctagctacaacgaccggtgcc

SEQ ID NO: 16530 - DNA, 31 bp, Artificial Sequence
  Description of Artificial Sequence:  Enzymatic Nucleic Acid
gcggcctgggctagctacaacgatcgcccgg

SEQ ID NO: 16531 - DNA, 31 bp, Artificial Sequence
  Description of Artificial Sequence:  Enzymatic Nucleic Acid
cgacgcggggctagctacaacgactgctcgc

SEQ ID NO: 16532 - DNA, 31 bp, Artificial Sequence
  Description of Artificial Sequence:  Enzymatic Nucleic Acid
gcgcgacgggctagctacaacgaggcctgct

SEQ ID NO: 16533 - DNA, 31 bp, Artificial Sequence
  Description of Artificial Sequence:  Enzymatic Nucleic Acid
gagcgcgaggctagctacaacgagcggcctg

SEQ ID NO: 16534 - DNA, 31 bp, Artificial Sequence
  Description of Artificial Sequence:  Enzymatic Nucleic Acid
ggtgagcgggctagctacaacgagacgcggc

SEQ ID NO: 16535 - DNA, 31 bp, Artificial Sequence
  Description of Artificial Sequence:  Enzymatic Nucleic Acid
atggtgagggctagctacaacgagcgacgcg

SEQ ID NO: 16536 - DNA, 31 bp, Artificial Sequence
  Description of Artificial Sequence:  Enzymatic Nucleic Acid
gaccatggggctagctacaacgagagcgcga

SEQ ID NO: 16537 - DNA, 31 bp, Artificial Sequence
  Description of Artificial Sequence:  Enzymatic Nucleic Acid
gctgaccaggctagctacaacgaggtgagcg

SEQ ID NO: 16538 - DNA, 31 bp, Artificial Sequence
  Description of Artificial Sequence:  Enzymatic Nucleic Acid
gtagctgaggctagctacaacgacatggtga

SEQ ID NO: 16539 - DNA, 31 bp, Artificial Sequence
  Description of Artificial Sequence:  Enzymatic Nucleic Acid
cccagtagggctagctacaacgatgaccatg

SEQ ID NO: 16540 - DNA, 31 bp, Artificial Sequence
  Description of Artificial Sequence:  Enzymatic Nucleic Acid
tgtcccagggctagctacaacgaagctgacc

SEQ ID NO: 16541 - DNA, 31 bp, Artificial Sequence
  Description of Artificial Sequence:  Enzymatic Nucleic Acid
ccccggtgggctagctacaacgacccagtag

SEQ ID NO: 16542 - DNA, 31 bp, Artificial Sequence
  Description of Artificial Sequence:  Enzymatic Nucleic Acid
gaccccggggctagctacaacgagtcccagt

SEQ ID NO: 16543 - DNA, 31 bp, Artificial Sequence
  Description of Artificial Sequence:  Enzymatic Nucleic Acid
cagcaggaggctagctacaacgacccggtgt

SEQ ID NO: 16544 - DNA, 31 bp, Artificial Sequence
  Description of Artificial Sequence:  Enzymatic Nucleic Acid
gcgcacagggctagctacaacgaaggacccc

SEQ ID NO: 16545 - DNA, 31 bp, Artificial Sequence
  Description of Artificial Sequence:  Enzymatic Nucleic Acid
agcgcgcaggctagctacaacgaagcaggac

SEQ ID NO: 16546 - DNA, 31 bp, Artificial Sequence
  Description of Artificial Sequence:  Enzymatic Nucleic Acid
gcagcgcgggctagctacaacgaacagcagg

SEQ ID NO: 16547 - DNA, 31 bp, Artificial Sequence
  Description of Artificial Sequence:  Enzymatic Nucleic Acid
gagcagcgggctagctacaacgagcacagca

SEQ ID NO: 16548 - DNA, 31 bp, Artificial Sequence
  Description of Artificial Sequence:  Enzymatic Nucleic Acid
ctgagcagggctagctacaacgagcgcacag

SEQ ID NO: 16549 - DNA, 31 bp, Artificial Sequence
  Description of Artificial Sequence:  Enzymatic Nucleic Acid
cagctgagggctagctacaacgaagcgcgca

SEQ ID NO: 16550 - DNA, 31 bp, Artificial Sequence
  Description of Artificial Sequence:  Enzymatic Nucleic Acid
gcagacagggctagctacaacgatgagcagc

SEQ ID NO: 16551 - DNA, 31 bp, Artificial Sequence
  Description of Artificial Sequence:  Enzymatic Nucleic Acid
gaagcagaggctagctacaacgaagctgagc

SEQ ID NO: 16552 - DNA, 31 bp, Artificial Sequence
  Description of Artificial Sequence:  Enzymatic Nucleic Acid
gtgagaagggctagctacaacgaagacagct

SEQ ID NO: 16553 - DNA, 31 bp, Artificial Sequence
  Description of Artificial Sequence:  Enzymatic Nucleic Acid
agatcctgggctagctacaacgagagaagca

SEQ ID NO: 16554 - DNA, 31 bp, Artificial Sequence
  Description of Artificial Sequence:  Enzymatic Nucleic Acid
gaactagaggctagctacaacgacctgtgag

SEQ ID NO: 16555 - DNA, 31 bp, Artificial Sequence
  Description of Artificial Sequence:  Enzymatic Nucleic Acid
aacctgaaggctagctacaacgatagatcct

SEQ ID NO: 16556 - DNA, 31 bp, Artificial Sequence
  Description of Artificial Sequence:  Enzymatic Nucleic Acid
attttgaaggctagctacaacgactgaacta

SEQ ID NO: 16557 - DNA, 31 bp, Artificial Sequence
  Description of Artificial Sequence:  Enzymatic Nucleic Acid
tcttttaaggctagctacaacgatttgaacc

SEQ ID NO: 16558 - DNA, 31 bp, Artificial Sequence
  Description of Artificial Sequence:  Enzymatic Nucleic Acid
gttcaggaggctagctacaacgacttttaat

SEQ ID NO: 16559 - DNA, 31 bp, Artificial Sequence
  Description of Artificial Sequence:  Enzymatic Nucleic Acid
aaactcagggctagctacaacgatcaggatc

SEQ ID NO: 16560 - DNA, 31 bp, Artificial Sequence
  Description of Artificial Sequence:  Enzymatic Nucleic Acid
cttttaaaggctagctacaacgatcagttca

SEQ ID NO: 16561 - DNA, 31 bp, Artificial Sequence
  Description of Artificial Sequence:  Enzymatic Nucleic Acid
gctgggtgggctagctacaacgacttttaaa

SEQ ID NO: 16562 - DNA, 31 bp, Artificial Sequence
  Description of Artificial Sequence:  Enzymatic Nucleic Acid
gtgctgggggctagctacaacgagcctttta

SEQ ID NO: 16563 - DNA, 31 bp, Artificial Sequence
  Description of Artificial Sequence:  Enzymatic Nucleic Acid
atgatgtgggctagctacaacgatgggtgcc

SEQ ID NO: 16564 - DNA, 31 bp, Artificial Sequence
  Description of Artificial Sequence:  Enzymatic Nucleic Acid
gcatgatgggctagctacaacgagctgggtg

SEQ ID NO: 16565 - DNA, 31 bp, Artificial Sequence
  Description of Artificial Sequence:  Enzymatic Nucleic Acid
ttgcatgaggctagctacaacgagtgctggg

SEQ ID NO: 16566 - DNA, 31 bp, Artificial Sequence
  Description of Artificial Sequence:  Enzymatic Nucleic Acid
tgcttgcaggctagctacaacgagatgtgct

SEQ ID NO: 16567 - DNA, 31 bp, Artificial Sequence
  Description of Artificial Sequence:  Enzymatic Nucleic Acid
cctgcttgggctagctacaacgaatgatgtg

SEQ ID NO: 16568 - DNA, 31 bp, Artificial Sequence
  Description of Artificial Sequence:  Enzymatic Nucleic Acid
ctggcctgggctagctacaacgattgcatga

SEQ ID NO: 16569 - DNA, 31 bp, Artificial Sequence
  Description of Artificial Sequence:  Enzymatic Nucleic Acid
gtgtctggggctagctacaacgactgcttgc

SEQ ID NO: 16570 - DNA, 31 bp, Artificial Sequence
  Description of Artificial Sequence:  Enzymatic Nucleic Acid
atgcagtgggctagctacaacgactggcctg

SEQ ID NO: 16571 - DNA, 31 bp, Artificial Sequence
  Description of Artificial Sequence:  Enzymatic Nucleic Acid
agatgcagggctagctacaacgagtctggcc

SEQ ID NO: 16572 - DNA, 31 bp, Artificial Sequence
  Description of Artificial Sequence:  Enzymatic Nucleic Acid
tggagatgggctagctacaacgaagtgtctg

SEQ ID NO: 16573 - DNA, 31 bp, Artificial Sequence
  Description of Artificial Sequence:  Enzymatic Nucleic Acid
attggagaggctagctacaacgagcagtgtc

SEQ ID NO: 16574 - DNA, 31 bp, Artificial Sequence
  Description of Artificial Sequence:  Enzymatic Nucleic Acid
cccctgcaggctagctacaacgatggagatg

SEQ ID NO: 16575 - DNA, 31 bp, Artificial Sequence
  Description of Artificial Sequence:  Enzymatic Nucleic Acid
cccccctgggctagctacaacgaattggaga

SEQ ID NO: 16576 - DNA, 31 bp, Artificial Sequence
  Description of Artificial Sequence:  Enzymatic Nucleic Acid
atgggctgggctagctacaacgattcccccc

SEQ ID NO: 16577 - DNA, 31 bp, Artificial Sequence
  Description of Artificial Sequence:  Enzymatic Nucleic Acid
tttatgggggctagctacaacgatgcttccc

SEQ ID NO: 16578 - DNA, 31 bp, Artificial Sequence
  Description of Artificial Sequence:  Enzymatic Nucleic Acid
accatttaggctagctacaacgagggctgct

SEQ ID NO: 16579 - DNA, 31 bp, Artificial Sequence
  Description of Artificial Sequence:  Enzymatic Nucleic Acid
aaagaccaggctagctacaacgattatgggc

SEQ ID NO: 16580 - DNA, 31 bp, Artificial Sequence
  Description of Artificial Sequence:  Enzymatic Nucleic Acid
ggcaaagaggctagctacaacgacatttatg

SEQ ID NO: 16581 - DNA, 31 bp, Artificial Sequence
  Description of Artificial Sequence:  Enzymatic Nucleic Acid
atttcaggggctagctacaacgaaaagacca

SEQ ID NO: 16582 - DNA, 31 bp, Artificial Sequence
  Description of Artificial Sequence:  Enzymatic Nucleic Acid
actcaccaggctagctacaacgattcaggca

SEQ ID NO: 16583 - DNA, 31 bp, Artificial Sequence
  Description of Artificial Sequence:  Enzymatic Nucleic Acid
cttactcaggctagctacaacgacatttcag

SEQ ID NO: 16584 - DNA, 31 bp, Artificial Sequence
  Description of Artificial Sequence:  Enzymatic Nucleic Acid
tttccttaggctagctacaacgatcaccatt

SEQ ID NO: 16585 - DNA, 31 bp, Artificial Sequence
  Description of Artificial Sequence:  Enzymatic Nucleic Acid
gcctttcgggctagctacaacgatttcctta

SEQ ID NO: 16586 - DNA, 31 bp, Artificial Sequence
  Description of Artificial Sequence:  Enzymatic Nucleic Acid
atgctcagggctagctacaacgactttcgct

SEQ ID NO: 16587 - DNA, 31 bp, Artificial Sequence
  Description of Artificial Sequence:  Enzymatic Nucleic Acid
tagttatgggctagctacaacgatcagcctt

SEQ ID NO: 16588 - DNA, 31 bp, Artificial Sequence
  Description of Artificial Sequence:  Enzymatic Nucleic Acid
tttagttaggctagctacaacgagctcagcc

SEQ ID NO: 16589 - DNA, 31 bp, Artificial Sequence
  Description of Artificial Sequence:  Enzymatic Nucleic Acid
agatttagggctagctacaacgatatgctca

SEQ ID NO: 16590 - DNA, 31 bp, Artificial Sequence
  Description of Artificial Sequence:  Enzymatic Nucleic Acid
caggcagaggctagctacaacgattagttat

SEQ ID NO: 16591 - DNA, 31 bp, Artificial Sequence
  Description of Artificial Sequence:  Enzymatic Nucleic Acid
tccacaggggctagctacaacgaagatttag

SEQ ID NO: 16592 - DNA, 31 bp, Artificial Sequence
  Description of Artificial Sequence:  Enzymatic Nucleic Acid
ttcttccaggctagctacaacgaaggcagat

SEQ ID NO: 16593 - DNA, 31 bp, Artificial Sequence
  Description of Artificial Sequence:  Enzymatic Nucleic Acid
gtttgccaggctagctacaacgattcttcca

SEQ ID NO: 16594 - DNA, 31 bp, Artificial Sequence
  Description of Artificial Sequence:  Enzymatic Nucleic Acid
attgtttgggctagctacaacgacatttctt

SEQ ID NO: 16595 - DNA, 31 bp, Artificial Sequence
  Description of Artificial Sequence:  Enzymatic Nucleic Acid
cagaattgggctagctacaacgattgccatt

SEQ ID NO: 16596 - DNA, 31 bp, Artificial Sequence
  Description of Artificial Sequence:  Enzymatic Nucleic Acid
ctgcagaaggctagctacaacgatgtttgcc

SEQ ID NO: 16597 - DNA, 31 bp, Artificial Sequence
  Description of Artificial Sequence:  Enzymatic Nucleic Acid
aagtactgggctagctacaacgaagaattgt

SEQ ID NO: 16598 - DNA, 31 bp, Artificial Sequence
  Description of Artificial Sequence:  Enzymatic Nucleic Acid
ttaaagtaggctagctacaacgatgcagaat

SEQ ID NO: 16599 - DNA, 31 bp, Artificial Sequence
  Description of Artificial Sequence:  Enzymatic Nucleic Acid
ggttaaagggctagctacaacgaactgcaga

SEQ ID NO: 16600 - DNA, 31 bp, Artificial Sequence
  Description of Artificial Sequence:  Enzymatic Nucleic Acid
gttcaaggggctagctacaacgataaagtac

SEQ ID NO: 16601 - DNA, 31 bp, Artificial Sequence
  Description of Artificial Sequence:  Enzymatic Nucleic Acid
gagctgtgggctagctacaacgatcaaggtt

SEQ ID NO: 16602 - DNA, 31 bp, Artificial Sequence
  Description of Artificial Sequence:  Enzymatic Nucleic Acid
ttgagctgggctagctacaacgagttcaagg

SEQ ID NO: 16603 - DNA, 31 bp, Artificial Sequence
  Description of Artificial Sequence:  Enzymatic Nucleic Acid
tgcttgagggctagctacaacgatgtgttca

SEQ ID NO: 16604 - DNA, 31 bp, Artificial Sequence
  Description of Artificial Sequence:  Enzymatic Nucleic Acid
gtggtttgggctagctacaacgattgagctg

SEQ ID NO: 16605 - DNA, 31 bp, Artificial Sequence
  Description of Artificial Sequence:  Enzymatic Nucleic Acid
cagtgtggggctagctacaacgattgcttga

SEQ ID NO: 16606 - DNA, 31 bp, Artificial Sequence
  Description of Artificial Sequence:  Enzymatic Nucleic Acid
agccagtgggctagctacaacgaggtttgct

SEQ ID NO: 16607 - DNA, 31 bp, Artificial Sequence
  Description of Artificial Sequence:  Enzymatic Nucleic Acid
gaagccagggctagctacaacgagtggtttg

SEQ ID NO: 16608 - DNA, 31 bp, Artificial Sequence
  Description of Artificial Sequence:  Enzymatic Nucleic Acid
tgtagaagggctagctacaacgacagtgtgg

SEQ ID NO: 16609 - DNA, 31 bp, Artificial Sequence
  Description of Artificial Sequence:  Enzymatic Nucleic Acid
tgcagctgggctagctacaacgaagaagcca

SEQ ID NO: 16610 - DNA, 31 bp, Artificial Sequence
  Description of Artificial Sequence:  Enzymatic Nucleic Acid
atttgcagggctagctacaacgatgtagaag

SEQ ID NO: 16611 - DNA, 31 bp, Artificial Sequence
  Description of Artificial Sequence:  Enzymatic Nucleic Acid
gatatttgggctagctacaacgaagctgtag

SEQ ID NO: 16612 - DNA, 31 bp, Artificial Sequence
  Description of Artificial Sequence:  Enzymatic Nucleic Acid
gctagataggctagctacaacgattgcagct

SEQ ID NO: 16613 - DNA, 31 bp, Artificial Sequence
  Description of Artificial Sequence:  Enzymatic Nucleic Acid
cagctagaggctagctacaacgaatttgcag

SEQ ID NO: 16614 - DNA, 31 bp, Artificial Sequence
  Description of Artificial Sequence:  Enzymatic Nucleic Acid
aggtacagggctagctacaacgatagatatt

SEQ ID NO: 16615 - DNA, 31 bp, Artificial Sequence
  Description of Artificial Sequence:  Enzymatic Nucleic Acid
agtaggtaggctagctacaacgaagctagat

SEQ ID NO: 16616 - DNA, 31 bp, Artificial Sequence
  Description of Artificial Sequence:  Enzymatic Nucleic Acid
gaagtaggggctagctacaacgaacagctag

SEQ ID NO: 16617 - DNA, 31 bp, Artificial Sequence
  Description of Artificial Sequence:  Enzymatic Nucleic Acid
ctttgaagggctagctacaacgaaggtacag

SEQ ID NO: 16618 - DNA, 31 bp, Artificial Sequence
  Description of Artificial Sequence:  Enzymatic Nucleic Acid
agattctgggctagctacaacgattccttct

SEQ ID NO: 16619 - DNA, 31 bp, Artificial Sequence
  Description of Artificial Sequence:  Enzymatic Nucleic Acid
attgcagaggctagctacaacgatctgtttc

SEQ ID NO: 16620 - DNA, 31 bp, Artificial Sequence
  Description of Artificial Sequence:  Enzymatic Nucleic Acid
atagattgggctagctacaacgaagattctg

SEQ ID NO: 16621 - DNA, 31 bp, Artificial Sequence
  Description of Artificial Sequence:  Enzymatic Nucleic Acid
tatatagaggctagctacaacgatgcagatt

SEQ ID NO: 16622 - DNA, 31 bp, Artificial Sequence
  Description of Artificial Sequence:  Enzymatic Nucleic Acid
taaatataggctagctacaacgaagattgca

SEQ ID NO: 16623 - DNA, 31 bp, Artificial Sequence
  Description of Artificial Sequence:  Enzymatic Nucleic Acid
aataaataggctagctacaacgaatagattg

SEQ ID NO: 16624 - DNA, 31 bp, Artificial Sequence
  Description of Artificial Sequence:  Enzymatic Nucleic Acid
ctaataaaggctagctacaacgaatatagat

SEQ ID NO: 16625 - DNA, 31 bp, Artificial Sequence
  Description of Artificial Sequence:  Enzymatic Nucleic Acid
atcactaaggctagctacaacgaaaatatat

SEQ ID NO: 16626 - DNA, 31 bp, Artificial Sequence
  Description of Artificial Sequence:  Enzymatic Nucleic Acid
ctgtatcaggctagctacaacgataataaat

SEQ ID NO: 16627 - DNA, 31 bp, Artificial Sequence
  Description of Artificial Sequence:  Enzymatic Nucleic Acid
tacctgtaggctagctacaacgacactaata

SEQ ID NO: 16628 - DNA, 31 bp, Artificial Sequence
  Description of Artificial Sequence:  Enzymatic Nucleic Acid
tctacctgggctagctacaacgaatcactaa

SEQ ID NO: 16629 - DNA, 31 bp, Artificial Sequence
  Description of Artificial Sequence:  Enzymatic Nucleic Acid
aaggtctaggctagctacaacgactgtatca

SEQ ID NO: 16630 - DNA, 31 bp, Artificial Sequence
  Description of Artificial Sequence:  Enzymatic Nucleic Acid
acgaaaggggctagctacaacgactacctgt

SEQ ID NO: 16631 - DNA, 31 bp, Artificial Sequence
  Description of Artificial Sequence:  Enzymatic Nucleic Acid
catctctaggctagctacaacgagaaaggtc

SEQ ID NO: 16632 - DNA, 31 bp, Artificial Sequence
  Description of Artificial Sequence:  Enzymatic Nucleic Acid
actgtacaggctagctacaacgactctacga

SEQ ID NO: 16633 - DNA, 31 bp, Artificial Sequence
  Description of Artificial Sequence:  Enzymatic Nucleic Acid
tcactgtaggctagctacaacgaatctctac

SEQ ID NO: 16634 - DNA, 31 bp, Artificial Sequence
  Description of Artificial Sequence:  Enzymatic Nucleic Acid
tttcactgggctagctacaacgaacatctct

SEQ ID NO: 16635 - DNA, 31 bp, Artificial Sequence
  Description of Artificial Sequence:  Enzymatic Nucleic Acid
ggatttcaggctagctacaacgatgtacatc

SEQ ID NO: 16636 - DNA, 31 bp, Artificial Sequence
  Description of Artificial Sequence:  Enzymatic Nucleic Acid
ttcggggaggctagctacaacgattcactgt

SEQ ID NO: 16637 - DNA, 31 bp, Artificial Sequence
  Description of Artificial Sequence:  Enzymatic Nucleic Acid
gtgtataaggctagctacaacgattcgggga

SEQ ID NO: 16638 - DNA, 31 bp, Artificial Sequence
  Description of Artificial Sequence:  Enzymatic Nucleic Acid
catgtgtaggctagctacaacgaaatttcgg

SEQ ID NO: 16639 - DNA, 31 bp, Artificial Sequence
  Description of Artificial Sequence:  Enzymatic Nucleic Acid
gtcatgtgggctagctacaacgaataatttc

SEQ ID NO: 16640 - DNA, 31 bp, Artificial Sequence
  Description of Artificial Sequence:  Enzymatic Nucleic Acid
cagtcatgggctagctacaacgagtataatt

SEQ ID NO: 16641 - DNA, 31 bp, Artificial Sequence
  Description of Artificial Sequence:  Enzymatic Nucleic Acid
ttcagtcaggctagctacaacgagtgtataa

SEQ ID NO: 16642 - DNA, 31 bp, Artificial Sequence
  Description of Artificial Sequence:  Enzymatic Nucleic Acid
tccttcagggctagctacaacgacatgtgta

SEQ ID NO: 16643 - DNA, 31 bp, Artificial Sequence
  Description of Artificial Sequence:  Enzymatic Nucleic Acid
atgacgagggctagctacaacgatcccttcc

SEQ ID NO: 16644 - DNA, 31 bp, Artificial Sequence
  Description of Artificial Sequence:  Enzymatic Nucleic Acid
gggaatgaggctagctacaacgagagctccc

SEQ ID NO: 16645 - DNA, 31 bp, Artificial Sequence
  Description of Artificial Sequence:  Enzymatic Nucleic Acid
gcagggaaggctagctacaacgagacgagct

SEQ ID NO: 16646 - DNA, 31 bp, Artificial Sequence
  Description of Artificial Sequence:  Enzymatic Nucleic Acid
taacccggggctagctacaacgaagggaatg

SEQ ID NO: 16647 - DNA, 31 bp, Artificial Sequence
  Description of Artificial Sequence:  Enzymatic Nucleic Acid
tgacgtaaggctagctacaacgaccggcagg

SEQ ID NO: 16648 - DNA, 31 bp, Artificial Sequence
  Description of Artificial Sequence:  Enzymatic Nucleic Acid
aggtgacgggctagctacaacgaaacccggc

SEQ ID NO: 16649 - DNA, 31 bp, Artificial Sequence
  Description of Artificial Sequence:  Enzymatic Nucleic Acid
ttaggtgaggctagctacaacgagtaacccg

SEQ ID NO: 16650 - DNA, 31 bp, Artificial Sequence
  Description of Artificial Sequence:  Enzymatic Nucleic Acid
atgttaggggctagctacaacgagacgtaac

SEQ ID NO: 16651 - DNA, 31 bp, Artificial Sequence
  Description of Artificial Sequence:  Enzymatic Nucleic Acid
cagtgatgggctagctacaacgataggtgac

SEQ ID NO: 16652 - DNA, 31 bp, Artificial Sequence
  Description of Artificial Sequence:  Enzymatic Nucleic Acid
aacagtgaggctagctacaacgagttaggtg

SEQ ID NO: 16653 - DNA, 31 bp, Artificial Sequence
  Description of Artificial Sequence:  Enzymatic Nucleic Acid
agtaacagggctagctacaacgagatgttag

SEQ ID NO: 16654 - DNA, 31 bp, Artificial Sequence
  Description of Artificial Sequence:  Enzymatic Nucleic Acid
taaagtaaggctagctacaacgaagtgatgt

SEQ ID NO: 16655 - DNA, 31 bp, Artificial Sequence
  Description of Artificial Sequence:  Enzymatic Nucleic Acid
ttttaaagggctagctacaacgaaacagtga

SEQ ID NO: 16656 - DNA, 31 bp, Artificial Sequence
  Description of Artificial Sequence:  Enzymatic Nucleic Acid
agtggaaaggctagctacaacgattttttaa

SEQ ID NO: 16657 - DNA, 31 bp, Artificial Sequence
  Description of Artificial Sequence:  Enzymatic Nucleic Acid
gtgtcaagggctagctacaacgaggaaactt

SEQ ID NO: 16658 - DNA, 31 bp, Artificial Sequence
  Description of Artificial Sequence:  Enzymatic Nucleic Acid
tcaaagtgggctagctacaacgacaagtgga

SEQ ID NO: 16659 - DNA, 31 bp, Artificial Sequence
  Description of Artificial Sequence:  Enzymatic Nucleic Acid
gatcaaagggctagctacaacgagtcaagtg

SEQ ID NO: 16660 - DNA, 31 bp, Artificial Sequence
  Description of Artificial Sequence:  Enzymatic Nucleic Acid
atcagggaggctagctacaacgacaaagtgt

SEQ ID NO: 16661 - DNA, 31 bp, Artificial Sequence
  Description of Artificial Sequence:  Enzymatic Nucleic Acid
gttttccaggctagctacaacgacagggatc

SEQ ID NO: 16662 - DNA, 31 bp, Artificial Sequence
  Description of Artificial Sequence:  Enzymatic Nucleic Acid
attatgcgggctagctacaacgatttccatc

SEQ ID NO: 16663 - DNA, 31 bp, Artificial Sequence
  Description of Artificial Sequence:  Enzymatic Nucleic Acid
agattatgggctagctacaacgagttttcca

SEQ ID NO: 16664 - DNA, 31 bp, Artificial Sequence
  Description of Artificial Sequence:  Enzymatic Nucleic Acid
ccagattaggctagctacaacgagcgttttc

SEQ ID NO: 16665 - DNA, 31 bp, Artificial Sequence
  Description of Artificial Sequence:  Enzymatic Nucleic Acid
gtcccagaggctagctacaacgatatgcgtt

SEQ ID NO: 16666 - DNA, 31 bp, Artificial Sequence
  Description of Artificial Sequence:  Enzymatic Nucleic Acid
ttctactgggctagctacaacgacccagatt

SEQ ID NO: 16667 - DNA, 31 bp, Artificial Sequence
  Description of Artificial Sequence:  Enzymatic Nucleic Acid
cctttctaggctagctacaacgatgtcccag

SEQ ID NO: 16668 - DNA, 31 bp, Artificial Sequence
  Description of Artificial Sequence:  Enzymatic Nucleic Acid
tgatgaagggctagctacaacgacctttcta

SEQ ID NO: 16669 - DNA, 31 bp, Artificial Sequence
  Description of Artificial Sequence:  Enzymatic Nucleic Acid
tgatatgaggctagctacaacgagaagccct

SEQ ID NO: 16670 - DNA, 31 bp, Artificial Sequence
  Description of Artificial Sequence:  Enzymatic Nucleic Acid
atttgataggctagctacaacgagatgaagc

SEQ ID NO: 16671 - DNA, 31 bp, Artificial Sequence
  Description of Artificial Sequence:  Enzymatic Nucleic Acid
gcatttgaggctagctacaacgaatgatgaa

SEQ ID NO: 16672 - DNA, 31 bp, Artificial Sequence
  Description of Artificial Sequence:  Enzymatic Nucleic Acid
acgttgcaggctagctacaacgattgatatg

SEQ ID NO: 16673 - DNA, 31 bp, Artificial Sequence
  Description of Artificial Sequence:  Enzymatic Nucleic Acid
gtacgttgggctagctacaacgaatttgata

SEQ ID NO: 16674 - DNA, 31 bp, Artificial Sequence
  Description of Artificial Sequence:  Enzymatic Nucleic Acid
tttgtacgggctagctacaacgatgcatttg

SEQ ID NO: 16675 - DNA, 31 bp, Artificial Sequence
  Description of Artificial Sequence:  Enzymatic Nucleic Acid
tctttgtaggctagctacaacgagttgcatt

SEQ ID NO: 16676 - DNA, 31 bp, Artificial Sequence
  Description of Artificial Sequence:  Enzymatic Nucleic Acid
tttctttgggctagctacaacgaacgttgca

SEQ ID NO: 16677 - DNA, 31 bp, Artificial Sequence
  Description of Artificial Sequence:  Enzymatic Nucleic Acid
aagccctaggctagctacaacgattctttgt

SEQ ID NO: 16678 - DNA, 31 bp, Artificial Sequence
  Description of Artificial Sequence:  Enzymatic Nucleic Acid
gtcagaagggctagctacaacgacctatttc

SEQ ID NO: 16679 - DNA, 31 bp, Artificial Sequence
  Description of Artificial Sequence:  Enzymatic Nucleic Acid
ttcacaggggctagctacaacgacagaagcc

SEQ ID NO: 16680 - DNA, 31 bp, Artificial Sequence
  Description of Artificial Sequence:  Enzymatic Nucleic Acid
ttgcttcaggctagctacaacgaaggtcaga

SEQ ID NO: 16681 - DNA, 31 bp, Artificial Sequence
  Description of Artificial Sequence:  Enzymatic Nucleic Acid
gactgttgggctagctacaacgattcacagg

SEQ ID NO: 16682 - DNA, 31 bp, Artificial Sequence
  Description of Artificial Sequence:  Enzymatic Nucleic Acid
attgactgggctagctacaacgatgcttcac

SEQ ID NO: 16683 - DNA, 31 bp, Artificial Sequence
  Description of Artificial Sequence:  Enzymatic Nucleic Acid
cccattgaggctagctacaacgatgttgctt

SEQ ID NO: 16684 - DNA, 31 bp, Artificial Sequence
  Description of Artificial Sequence:  Enzymatic Nucleic Acid
aatgcccaggctagctacaacgatgactgtt

SEQ ID NO: 16685 - DNA, 31 bp, Artificial Sequence
  Description of Artificial Sequence:  Enzymatic Nucleic Acid
tacaaatgggctagctacaacgaccattgac

SEQ ID NO: 16686 - DNA, 31 bp, Artificial Sequence
  Description of Artificial Sequence:  Enzymatic Nucleic Acid
tatacaaaggctagctacaacgagcccattg

SEQ ID NO: 16687 - DNA, 31 bp, Artificial Sequence
  Description of Artificial Sequence:  Enzymatic Nucleic Acid
gtcttataggctagctacaacgaaaatgccc

SEQ ID NO: 16688 - DNA, 31 bp, Artificial Sequence
  Description of Artificial Sequence:  Enzymatic Nucleic Acid
ttgtcttaggctagctacaacgaacaaatgc

SEQ ID NO: 16689 - DNA, 31 bp, Artificial Sequence
  Description of Artificial Sequence:  Enzymatic Nucleic Acid
atagtttgggctagctacaacgacttataca

SEQ ID NO: 16690 - DNA, 31 bp, Artificial Sequence
  Description of Artificial Sequence:  Enzymatic Nucleic Acid
tgagatagggctagctacaacgattgtctta

SEQ ID NO: 16691 - DNA, 31 bp, Artificial Sequence
  Description of Artificial Sequence:  Enzymatic Nucleic Acid
gtgtgagaggctagctacaacgaagtttgtc

SEQ ID NO: 16692 - DNA, 31 bp, Artificial Sequence
  Description of Artificial Sequence:  Enzymatic Nucleic Acid
tcgatgtgggctagctacaacgagagatagt

SEQ ID NO: 16693 - DNA, 31 bp, Artificial Sequence
  Description of Artificial Sequence:  Enzymatic Nucleic Acid
tgtcgatgggctagctacaacgagtgagata

SEQ ID NO: 16694 - DNA, 31 bp, Artificial Sequence
  Description of Artificial Sequence:  Enzymatic Nucleic Acid
tttgtcgaggctagctacaacgagtgtgaga

SEQ ID NO: 16695 - DNA, 31 bp, Artificial Sequence
  Description of Artificial Sequence:  Enzymatic Nucleic Acid
ttggtttgggctagctacaacgacgatgtgt

SEQ ID NO: 16696 - DNA, 31 bp, Artificial Sequence
  Description of Artificial Sequence:  Enzymatic Nucleic Acid
tgtattggggctagctacaacgattgtcgat

SEQ ID NO: 16697 - DNA, 31 bp, Artificial Sequence
  Description of Artificial Sequence:  Enzymatic Nucleic Acid
tgattgtaggctagctacaacgatggtttgt

SEQ ID NO: 16698 - DNA, 31 bp, Artificial Sequence
  Description of Artificial Sequence:  Enzymatic Nucleic Acid
tatgattgggctagctacaacgaattggttt

SEQ ID NO: 16699 - DNA, 31 bp, Artificial Sequence
  Description of Artificial Sequence:  Enzymatic Nucleic Acid
atctatgaggctagctacaacgatgtattgg

SEQ ID NO: 16700 - DNA, 31 bp, Artificial Sequence
  Description of Artificial Sequence:  Enzymatic Nucleic Acid
gacatctaggctagctacaacgagattgtat

SEQ ID NO: 16701 - DNA, 31 bp, Artificial Sequence
  Description of Artificial Sequence:  Enzymatic Nucleic Acid
tttggacaggctagctacaacgactatgatt

SEQ ID NO: 16702 - DNA, 31 bp, Artificial Sequence
  Description of Artificial Sequence:  Enzymatic Nucleic Acid
tatttggaggctagctacaacgaatctatga

SEQ ID NO: 16703 - DNA, 31 bp, Artificial Sequence
  Description of Artificial Sequence:  Enzymatic Nucleic Acid
tgtgcttaggctagctacaacgattggacat

SEQ ID NO: 16704 - DNA, 31 bp, Artificial Sequence
  Description of Artificial Sequence:  Enzymatic Nucleic Acid
gtggtgtgggctagctacaacgattatttgg

SEQ ID NO: 16705 - DNA, 31 bp, Artificial Sequence
  Description of Artificial Sequence:  Enzymatic Nucleic Acid
gcgtggtgggctagctacaacgagcttattt

SEQ ID NO: 16706 - DNA, 31 bp, Artificial Sequence
  Description of Artificial Sequence:  Enzymatic Nucleic Acid
gggcgtggggctagctacaacgagtgcttat

SEQ ID NO: 16707 - DNA, 31 bp, Artificial Sequence
  Description of Artificial Sequence:  Enzymatic Nucleic Acid
actgggcgggctagctacaacgaggtgtgct

SEQ ID NO: 16708 - DNA, 31 bp, Artificial Sequence
  Description of Artificial Sequence:  Enzymatic Nucleic Acid
tgactgggggctagctacaacgagtggtgtg

SEQ ID NO: 16709 - DNA, 31 bp, Artificial Sequence
  Description of Artificial Sequence:  Enzymatic Nucleic Acid
taatttgaggctagctacaacgatgggcgtg

SEQ ID NO: 16710 - DNA, 31 bp, Artificial Sequence
  Description of Artificial Sequence:  Enzymatic Nucleic Acid
ctaagtaaggctagctacaacgattgactgg

SEQ ID NO: 16711 - DNA, 31 bp, Artificial Sequence
  Description of Artificial Sequence:  Enzymatic Nucleic Acid
cctctaagggctagctacaacgaaatttgac

SEQ ID NO: 16712 - DNA, 31 bp, Artificial Sequence
  Description of Artificial Sequence:  Enzymatic Nucleic Acid
gagtatggggctagctacaacgactctaagt

SEQ ID NO: 16713 - DNA, 31 bp, Artificial Sequence
  Description of Artificial Sequence:  Enzymatic Nucleic Acid
caagagtaggctagctacaacgaggcctcta

SEQ ID NO: 16714 - DNA, 31 bp, Artificial Sequence
  Description of Artificial Sequence:  Enzymatic Nucleic Acid
gacaagagggctagctacaacgaatggcctc

SEQ ID NO: 16715 - DNA, 31 bp, Artificial Sequence
  Description of Artificial Sequence:  Enzymatic Nucleic Acid
attgaggaggctagctacaacgaaagagtat

SEQ ID NO: 16716 - DNA, 31 bp, Artificial Sequence
  Description of Artificial Sequence:  Enzymatic Nucleic Acid
cagtacaaggctagctacaacgatgaggaca

SEQ ID NO: 16717 - DNA, 31 bp, Artificial Sequence
  Description of Artificial Sequence:  Enzymatic Nucleic Acid
tagcagtaggctagctacaacgaaattgagg

SEQ ID NO: 16718 - DNA, 31 bp, Artificial Sequence
  Description of Artificial Sequence:  Enzymatic Nucleic Acid
ggtagcagggctagctacaacgaacaattga

SEQ ID NO: 16719 - DNA, 31 bp, Artificial Sequence
  Description of Artificial Sequence:  Enzymatic Nucleic Acid
agtggtagggctagctacaacgaagtacaat

SEQ ID NO: 16720 - DNA, 31 bp, Artificial Sequence
  Description of Artificial Sequence:  Enzymatic Nucleic Acid
gggagtggggctagctacaacgaagcagtac

SEQ ID NO: 16721 - DNA, 31 bp, Artificial Sequence
  Description of Artificial Sequence:  Enzymatic Nucleic Acid
caagggagggctagctacaacgaggtagcag

SEQ ID NO: 16722 - DNA, 31 bp, Artificial Sequence
  Description of Artificial Sequence:  Enzymatic Nucleic Acid
ctctcgtgggctagctacaacgatcaaggga

SEQ ID NO: 16723 - DNA, 31 bp, Artificial Sequence
  Description of Artificial Sequence:  Enzymatic Nucleic Acid
aactctcgggctagctacaacgagttcaagg

SEQ ID NO: 16724 - DNA, 31 bp, Artificial Sequence
  Description of Artificial Sequence:  Enzymatic Nucleic Acid
catttgaaggctagctacaacgatctcgtgt

SEQ ID NO: 16725 - DNA, 31 bp, Artificial Sequence
  Description of Artificial Sequence:  Enzymatic Nucleic Acid
ccaggtcaggctagctacaacgattgaactc

SEQ ID NO: 16726 - DNA, 31 bp, Artificial Sequence
  Description of Artificial Sequence:  Enzymatic Nucleic Acid
actccaggggctagctacaacgacatttgaa

SEQ ID NO: 16727 - DNA, 31 bp, Artificial Sequence
  Description of Artificial Sequence:  Enzymatic Nucleic Acid
cagggtaaggctagctacaacgatccaggtc

SEQ ID NO: 16728 - DNA, 31 bp, Artificial Sequence
  Description of Artificial Sequence:  Enzymatic Nucleic Acid
catcagggggctagctacaacgaaactccag

SEQ ID NO: 16729 - DNA, 31 bp, Artificial Sequence
  Description of Artificial Sequence:  Enzymatic Nucleic Acid
ttttttcaggctagctacaacgacagggtaa

SEQ ID NO: 16730 - DNA, 31 bp, Artificial Sequence
  Description of Artificial Sequence:  Enzymatic Nucleic Acid
ctctcttaggctagctacaacgattttttca

SEQ ID NO: 16731 - DNA, 31 bp, Artificial Sequence
  Description of Artificial Sequence:  Enzymatic Nucleic Acid
tacggaagggctagctacaacgatctcttat

SEQ ID NO: 16732 - DNA, 31 bp, Artificial Sequence
  Description of Artificial Sequence:  Enzymatic Nucleic Acid
tcgccttaggctagctacaacgaggaagctc

SEQ ID NO: 16733 - DNA, 31 bp, Artificial Sequence
  Description of Artificial Sequence:  Enzymatic Nucleic Acid
attcgtcgggctagctacaacgacttacgga

SEQ ID NO: 16734 - DNA, 31 bp, Artificial Sequence
  Description of Artificial Sequence:  Enzymatic Nucleic Acid
tcaattcgggctagctacaacgacgccttac

SEQ ID NO: 16735 - DNA, 31 bp, Artificial Sequence
  Description of Artificial Sequence:  Enzymatic Nucleic Acid
ttggtcaaggctagctacaacgatcgtcgcc

SEQ ID NO: 16736 - DNA, 31 bp, Artificial Sequence
  Description of Artificial Sequence:  Enzymatic Nucleic Acid
tgctttggggctagctacaacgacaattcgt

SEQ ID NO: 16737 - DNA, 31 bp, Artificial Sequence
  Description of Artificial Sequence:  Enzymatic Nucleic Acid
gggaattgggctagctacaacgatttggtca

SEQ ID NO: 16738 - DNA, 31 bp, Artificial Sequence
  Description of Artificial Sequence:  Enzymatic Nucleic Acid
catgggaaggctagctacaacgatgctttgg

SEQ ID NO: 16739 - DNA, 31 bp, Artificial Sequence
  Description of Artificial Sequence:  Enzymatic Nucleic Acid
tgttggcaggctagctacaacgagggaattg

SEQ ID NO: 16740 - DNA, 31 bp, Artificial Sequence
  Description of Artificial Sequence:  Enzymatic Nucleic Acid
tatgttggggctagctacaacgaatgggaat

SEQ ID NO: 16741 - DNA, 31 bp, Artificial Sequence
  Description of Artificial Sequence:  Enzymatic Nucleic Acid
agaatatgggctagctacaacgatggcatgg

SEQ ID NO: 16742 - DNA, 31 bp, Artificial Sequence
  Description of Artificial Sequence:  Enzymatic Nucleic Acid
gtagaataggctagctacaacgagttggcat

SEQ ID NO: 16743 - DNA, 31 bp, Artificial Sequence
  Description of Artificial Sequence:  Enzymatic Nucleic Acid
ctgtagaaggctagctacaacgaatgttggc

SEQ ID NO: 16744 - DNA, 31 bp, Artificial Sequence
  Description of Artificial Sequence:  Enzymatic Nucleic Acid
gaacactgggctagctacaacgaagaatatg

SEQ ID NO: 16745 - DNA, 31 bp, Artificial Sequence
  Description of Artificial Sequence:  Enzymatic Nucleic Acid
taagaacaggctagctacaacgatgtagaat

SEQ ID NO: 16746 - DNA, 31 bp, Artificial Sequence
  Description of Artificial Sequence:  Enzymatic Nucleic Acid
agtaagaaggctagctacaacgaactgtaga

SEQ ID NO: 16747 - DNA, 31 bp, Artificial Sequence
  Description of Artificial Sequence:  Enzymatic Nucleic Acid
gtcaatagggctagctacaacgaaagaacac

SEQ ID NO: 16748 - DNA, 31 bp, Artificial Sequence
  Description of Artificial Sequence:  Enzymatic Nucleic Acid
tttgtcaaggctagctacaacgaagtaagaa

SEQ ID NO: 16749 - DNA, 31 bp, Artificial Sequence
  Description of Artificial Sequence:  Enzymatic Nucleic Acid
gcattttgggctagctacaacgacaatagta

SEQ ID NO: 16750 - DNA, 31 bp, Artificial Sequence
  Description of Artificial Sequence:  Enzymatic Nucleic Acid
gttctgcaggctagctacaacgatttgtcaa

SEQ ID NO: 16751 - DNA, 31 bp, Artificial Sequence
  Description of Artificial Sequence:  Enzymatic Nucleic Acid
ttgttctgggctagctacaacgaattttgtc

SEQ ID NO: 16752 - DNA, 31 bp, Artificial Sequence
  Description of Artificial Sequence:  Enzymatic Nucleic Acid
tgtctttgggctagctacaacgatctgcatt

SEQ ID NO: 16753 - DNA, 31 bp, Artificial Sequence
  Description of Artificial Sequence:  Enzymatic Nucleic Acid
gtcctttgggctagctacaacgactttgttc

SEQ ID NO: 16754 - DNA, 31 bp, Artificial Sequence
  Description of Artificial Sequence:  Enzymatic Nucleic Acid
gtataaagggctagctacaacgacctttgtc

SEQ ID NO: 16755 - DNA, 31 bp, Artificial Sequence
  Description of Artificial Sequence:  Enzymatic Nucleic Acid
gacaagtaggctagctacaacgaaaagtcct

SEQ ID NO: 16756 - DNA, 31 bp, Artificial Sequence
  Description of Artificial Sequence:  Enzymatic Nucleic Acid
acgacaagggctagctacaacgaataaagtc

SEQ ID NO: 16757 - DNA, 31 bp, Artificial Sequence
  Description of Artificial Sequence:  Enzymatic Nucleic Acid
ttacacgaggctagctacaacgaaagtataa

SEQ ID NO: 16758 - DNA, 31 bp, Artificial Sequence
  Description of Artificial Sequence:  Enzymatic Nucleic Acid
tccttacaggctagctacaacgagacaagta

SEQ ID NO: 16759 - DNA, 31 bp, Artificial Sequence
  Description of Artificial Sequence:  Enzymatic Nucleic Acid
actccttaggctagctacaacgaacgacaag

SEQ ID NO: 16760 - DNA, 31 bp, Artificial Sequence
  Description of Artificial Sequence:  Enzymatic Nucleic Acid
atggtccaggctagctacaacgatccttaca

SEQ ID NO: 16761 - DNA, 31 bp, Artificial Sequence
  Description of Artificial Sequence:  Enzymatic Nucleic Acid
aatgatggggctagctacaacgaccactcct

SEQ ID NO: 16762 - DNA, 31 bp, Artificial Sequence
  Description of Artificial Sequence:  Enzymatic Nucleic Acid
ttgaatgaggctagctacaacgaggtccact

SEQ ID NO: 16763 - DNA, 31 bp, Artificial Sequence
  Description of Artificial Sequence:  Enzymatic Nucleic Acid
gatttgaaggctagctacaacgagatggtcc

SEQ ID NO: 16764 - DNA, 31 bp, Artificial Sequence
  Description of Artificial Sequence:  Enzymatic Nucleic Acid
ttaacagaggctagctacaacgattgaatga

SEQ ID NO: 16765 - DNA, 31 bp, Artificial Sequence
  Description of Artificial Sequence:  Enzymatic Nucleic Acid
ggtgttaaggctagctacaacgaagatttga

SEQ ID NO: 16766 - DNA, 31 bp, Artificial Sequence
  Description of Artificial Sequence:  Enzymatic Nucleic Acid
ctgaggtgggctagctacaacgataacagat

SEQ ID NO: 16767 - DNA, 31 bp, Artificial Sequence
  Description of Artificial Sequence:  Enzymatic Nucleic Acid
cactgaggggctagctacaacgagttaacag

SEQ ID NO: 16768 - DNA, 31 bp, Artificial Sequence
  Description of Artificial Sequence:  Enzymatic Nucleic Acid
tatatgcaggctagctacaacgatgaggtgt

SEQ ID NO: 16769 - DNA, 31 bp, Artificial Sequence
  Description of Artificial Sequence:  Enzymatic Nucleic Acid
tatatatgggctagctacaacgaactgaggt

SEQ ID NO: 16770 - DNA, 31 bp, Artificial Sequence
  Description of Artificial Sequence:  Enzymatic Nucleic Acid
catatataggctagctacaacgagcactgag

SEQ ID NO: 16771 - DNA, 31 bp, Artificial Sequence
  Description of Artificial Sequence:  Enzymatic Nucleic Acid
atcatataggctagctacaacgaatgcactg

SEQ ID NO: 16772 - DNA, 31 bp, Artificial Sequence
  Description of Artificial Sequence:  Enzymatic Nucleic Acid
ttatcataggctagctacaacgaatatgcac

SEQ ID NO: 16773 - DNA, 31 bp, Artificial Sequence
  Description of Artificial Sequence:  Enzymatic Nucleic Acid
ctttatcaggctagctacaacgaatatatgc

SEQ ID NO: 16774 - DNA, 31 bp, Artificial Sequence
  Description of Artificial Sequence:  Enzymatic Nucleic Acid
atgctttaggctagctacaacgacatatata

SEQ ID NO: 16775 - DNA, 31 bp, Artificial Sequence
  Description of Artificial Sequence:  Enzymatic Nucleic Acid
gatgaatgggctagctacaacgatttatcat

SEQ ID NO: 16776 - DNA, 31 bp, Artificial Sequence
  Description of Artificial Sequence:  Enzymatic Nucleic Acid
gtgatgaaggctagctacaacgagctttatc

SEQ ID NO: 16777 - DNA, 31 bp, Artificial Sequence
  Description of Artificial Sequence:  Enzymatic Nucleic Acid
cacagtgaggctagctacaacgagaatgctt

SEQ ID NO: 16778 - DNA, 31 bp, Artificial Sequence
  Description of Artificial Sequence:  Enzymatic Nucleic Acid
tttcacagggctagctacaacgagatgaatg

SEQ ID NO: 16779 - DNA, 31 bp, Artificial Sequence
  Description of Artificial Sequence:  Enzymatic Nucleic Acid
atgtttcaggctagctacaacgaagtgatga

SEQ ID NO: 16780 - DNA, 31 bp, Artificial Sequence
  Description of Artificial Sequence:  Enzymatic Nucleic Acid
tttcgatgggctagctacaacgattcacagt

SEQ ID NO: 16781 - DNA, 31 bp, Artificial Sequence
  Description of Artificial Sequence:  Enzymatic Nucleic Acid
gttttcgaggctagctacaacgagtttcaca

SEQ ID NO: 16782 - DNA, 31 bp, Artificial Sequence
  Description of Artificial Sequence:  Enzymatic Nucleic Acid
acctgctgggctagctacaacgatttcgatg

SEQ ID NO: 16783 - DNA, 31 bp, Artificial Sequence
  Description of Artificial Sequence:  Enzymatic Nucleic Acid
agcacctgggctagctacaacgatgttttcg

SEQ ID NO: 16784 - DNA, 31 bp, Artificial Sequence
  Description of Artificial Sequence:  Enzymatic Nucleic Acid
ttcaagcaggctagctacaacgactgctgtt

SEQ ID NO: 16785 - DNA, 31 bp, Artificial Sequence
  Description of Artificial Sequence:  Enzymatic Nucleic Acid
gtttcaagggctagctacaacgaacctgctg

SEQ ID NO: 16786 - DNA, 31 bp, Artificial Sequence
  Description of Artificial Sequence:  Enzymatic Nucleic Acid
agctacggggctagctacaacgattcaagca

SEQ ID NO: 16787 - DNA, 31 bp, Artificial Sequence
  Description of Artificial Sequence:  Enzymatic Nucleic Acid
gccagctaggctagctacaacgaggtttcaa

SEQ ID NO: 16788 - DNA, 31 bp, Artificial Sequence
  Description of Artificial Sequence:  Enzymatic Nucleic Acid
cttgccagggctagctacaacgatacggttt

SEQ ID NO: 16789 - DNA, 31 bp, Artificial Sequence
  Description of Artificial Sequence:  Enzymatic Nucleic Acid
accgcttgggctagctacaacgacagctacg

SEQ ID NO: 16790 - DNA, 31 bp, Artificial Sequence
  Description of Artificial Sequence:  Enzymatic Nucleic Acid
taagaccgggctagctacaacgattgccagc

SEQ ID NO: 16791 - DNA, 31 bp, Artificial Sequence
  Description of Artificial Sequence:  Enzymatic Nucleic Acid
cggtaagaggctagctacaacgacgcttgcc

SEQ ID NO: 16792 - DNA, 31 bp, Artificial Sequence
  Description of Artificial Sequence:  Enzymatic Nucleic Acid
agagccggggctagctacaacgaaagaccgc

SEQ ID NO: 16793 - DNA, 31 bp, Artificial Sequence
  Description of Artificial Sequence:  Enzymatic Nucleic Acid
atagagagggctagctacaacgacggtaaga

SEQ ID NO: 16794 - DNA, 31 bp, Artificial Sequence
  Description of Artificial Sequence:  Enzymatic Nucleic Acid
cactttcaggctagctacaacgaagagagcc

SEQ ID NO: 16795 - DNA, 31 bp, Artificial Sequence
  Description of Artificial Sequence:  Enzymatic Nucleic Acid
tgccttcaggctagctacaacgatttcatag

SEQ ID NO: 16796 - DNA, 31 bp, Artificial Sequence
  Description of Artificial Sequence:  Enzymatic Nucleic Acid
gggaaatgggctagctacaacgacttcactt

SEQ ID NO: 16797 - DNA, 31 bp, Artificial Sequence
  Description of Artificial Sequence:  Enzymatic Nucleic Acid
gagggaaaggctagctacaacgagccttcac

SEQ ID NO: 16798 - DNA, 31 bp, Artificial Sequence
  Description of Artificial Sequence:  Enzymatic Nucleic Acid
acttccggggctagctacaacgagagggaaa

SEQ ID NO: 16799 - DNA, 31 bp, Artificial Sequence
  Description of Artificial Sequence:  Enzymatic Nucleic Acid
ccatacaaggctagctacaacgattccggcg

SEQ ID NO: 16800 - DNA, 31 bp, Artificial Sequence
  Description of Artificial Sequence:  Enzymatic Nucleic Acid
taaccataggctagctacaacgaaacttccg

SEQ ID NO: 16801 - DNA, 31 bp, Artificial Sequence
  Description of Artificial Sequence:  Enzymatic Nucleic Acid
tttaaccaggctagctacaacgaacaacttc

SEQ ID NO: 16802 - DNA, 31 bp, Artificial Sequence
  Description of Artificial Sequence:  Enzymatic Nucleic Acid
tcttttaaggctagctacaacgacatacaac

SEQ ID NO: 16803 - DNA, 31 bp, Artificial Sequence
  Description of Artificial Sequence:  Enzymatic Nucleic Acid
gtaacccaggctagctacaacgacttttaac

SEQ ID NO: 16804 - DNA, 31 bp, Artificial Sequence
  Description of Artificial Sequence:  Enzymatic Nucleic Acid
gcaggtaaggctagctacaacgaccatcttt

SEQ ID NO: 16805 - DNA, 31 bp, Artificial Sequence
  Description of Artificial Sequence:  Enzymatic Nucleic Acid
gtcgcaggggctagctacaacgaaacccatc

SEQ ID NO: 16806 - DNA, 31 bp, Artificial Sequence
  Description of Artificial Sequence:  Enzymatic Nucleic Acid
ctcagtcgggctagctacaacgaaggtaacc

SEQ ID NO: 16807 - DNA, 31 bp, Artificial Sequence
  Description of Artificial Sequence:  Enzymatic Nucleic Acid
tttctcagggctagctacaacgacgcaggta

SEQ ID NO: 16808 - DNA, 31 bp, Artificial Sequence
  Description of Artificial Sequence:  Enzymatic Nucleic Acid
cgagcagaggctagctacaacgattctcagt

SEQ ID NO: 16809 - DNA, 31 bp, Artificial Sequence
  Description of Artificial Sequence:  Enzymatic Nucleic Acid
atagcgagggctagctacaacgaagatttct

SEQ ID NO: 16810 - DNA, 31 bp, Artificial Sequence
  Description of Artificial Sequence:  Enzymatic Nucleic Acid
tcaaatagggctagctacaacgagagcagat

SEQ ID NO: 16811 - DNA, 31 bp, Artificial Sequence
  Description of Artificial Sequence:  Enzymatic Nucleic Acid
gagtcaaaggctagctacaacgaagcgagca

SEQ ID NO: 16812 - DNA, 31 bp, Artificial Sequence
  Description of Artificial Sequence:  Enzymatic Nucleic Acid
gccacgagggctagctacaacgacaaatagc

SEQ ID NO: 16813 - DNA, 31 bp, Artificial Sequence
  Description of Artificial Sequence:  Enzymatic Nucleic Acid
agtagccaggctagctacaacgagagtcaaa

SEQ ID NO: 16814 - DNA, 31 bp, Artificial Sequence
  Description of Artificial Sequence:  Enzymatic Nucleic Acid
acgagtagggctagctacaacgacacgagtc

SEQ ID NO: 16815 - DNA, 31 bp, Artificial Sequence
  Description of Artificial Sequence:  Enzymatic Nucleic Acid
ttaacgagggctagctacaacgaagccacga

SEQ ID NO: 16816 - DNA, 31 bp, Artificial Sequence
  Description of Artificial Sequence:  Enzymatic Nucleic Acid
ataattaaggctagctacaacgagagtagcc

SEQ ID NO: 16817 - DNA, 31 bp, Artificial Sequence
  Description of Artificial Sequence:  Enzymatic Nucleic Acid
cttgataaggctagctacaacgataacgagt

SEQ ID NO: 16818 - DNA, 31 bp, Artificial Sequence
  Description of Artificial Sequence:  Enzymatic Nucleic Acid
gtccttgaggctagctacaacgaaattaacg

SEQ ID NO: 16819 - DNA, 31 bp, Artificial Sequence
  Description of Artificial Sequence:  Enzymatic Nucleic Acid
cagttacgggctagctacaacgaccttgata

SEQ ID NO: 16820 - DNA, 31 bp, Artificial Sequence
  Description of Artificial Sequence:  Enzymatic Nucleic Acid
ttcagttaggctagctacaacgagtccttga

SEQ ID NO: 16821 - DNA, 31 bp, Artificial Sequence
  Description of Artificial Sequence:  Enzymatic Nucleic Acid
ctcttcagggctagctacaacgatacgtcct

SEQ ID NO: 16822 - DNA, 31 bp, Artificial Sequence
  Description of Artificial Sequence:  Enzymatic Nucleic Acid
tccctgcaggctagctacaacgacctcttca

SEQ ID NO: 16823 - DNA, 31 bp, Artificial Sequence
  Description of Artificial Sequence:  Enzymatic Nucleic Acid
attccctgggctagctacaacgaatcctctt

SEQ ID NO: 16824 - DNA, 31 bp, Artificial Sequence
  Description of Artificial Sequence:  Enzymatic Nucleic Acid
ttgtataaggctagctacaacgatccctgca

SEQ ID NO: 16825 - DNA, 31 bp, Artificial Sequence
  Description of Artificial Sequence:  Enzymatic Nucleic Acid
agattgtaggctagctacaacgaaattccct

SEQ ID NO: 16826 - DNA, 31 bp, Artificial Sequence
  Description of Artificial Sequence:  Enzymatic Nucleic Acid
caagattgggctagctacaacgaataattcc

SEQ ID NO: 16827 - DNA, 31 bp, Artificial Sequence
  Description of Artificial Sequence:  Enzymatic Nucleic Acid
cagcaagaggctagctacaacgatgtataat

SEQ ID NO: 16828 - DNA, 31 bp, Artificial Sequence
  Description of Artificial Sequence:  Enzymatic Nucleic Acid
atgctcagggctagctacaacgaaagattgt

SEQ ID NO: 16829 - DNA, 31 bp, Artificial Sequence
  Description of Artificial Sequence:  Enzymatic Nucleic Acid
gttttatgggctagctacaacgatcagcaag

SEQ ID NO: 16830 - DNA, 31 bp, Artificial Sequence
  Description of Artificial Sequence:  Enzymatic Nucleic Acid
ctgttttaggctagctacaacgagctcagca

SEQ ID NO: 16831 - DNA, 31 bp, Artificial Sequence
  Description of Artificial Sequence:  Enzymatic Nucleic Acid
tttgactgggctagctacaacgatttatgct

SEQ ID NO: 16832 - DNA, 31 bp, Artificial Sequence
  Description of Artificial Sequence:  Enzymatic Nucleic Acid
acatttgaggctagctacaacgatgttttat

SEQ ID NO: 16833 - DNA, 31 bp, Artificial Sequence
  Description of Artificial Sequence:  Enzymatic Nucleic Acid
taaacacaggctagctacaacgattgactgt

SEQ ID NO: 16834 - DNA, 31 bp, Artificial Sequence
  Description of Artificial Sequence:  Enzymatic Nucleic Acid
tttaaacaggctagctacaacgaatttgact

SEQ ID NO: 16835 - DNA, 31 bp, Artificial Sequence
  Description of Artificial Sequence:  Enzymatic Nucleic Acid
tttttaaaggctagctacaacgaacatttga

SEQ ID NO: 16836 - DNA, 31 bp, Artificial Sequence
  Description of Artificial Sequence:  Enzymatic Nucleic Acid
cagtgaggggctagctacaacgattttaaac

SEQ ID NO: 16837 - DNA, 31 bp, Artificial Sequence
  Description of Artificial Sequence:  Enzymatic Nucleic Acid
agtggcagggctagctacaacgagaggtttt

SEQ ID NO: 16838 - DNA, 31 bp, Artificial Sequence
  Description of Artificial Sequence:  Enzymatic Nucleic Acid
tagagtggggctagctacaacgaagtgaggt

SEQ ID NO: 16839 - DNA, 31 bp, Artificial Sequence
  Description of Artificial Sequence:  Enzymatic Nucleic Acid
aattagagggctagctacaacgaggcagtga

SEQ ID NO: 16840 - DNA, 31 bp, Artificial Sequence
  Description of Artificial Sequence:  Enzymatic Nucleic Acid
attgacaaggctagctacaacgatagagtgg

SEQ ID NO: 16841 - DNA, 31 bp, Artificial Sequence
  Description of Artificial Sequence:  Enzymatic Nucleic Acid
cacattgaggctagctacaacgaaattagag

SEQ ID NO: 16842 - DNA, 31 bp, Artificial Sequence
  Description of Artificial Sequence:  Enzymatic Nucleic Acid
gtttcacaggctagctacaacgatgacaatt

SEQ ID NO: 16843 - DNA, 31 bp, Artificial Sequence
  Description of Artificial Sequence:  Enzymatic Nucleic Acid
gggtttcaggctagctacaacgaattgacaa

SEQ ID NO: 16844 - DNA, 31 bp, Artificial Sequence
  Description of Artificial Sequence:  Enzymatic Nucleic Acid
atctggggggctagctacaacgattcacatt

SEQ ID NO: 16845 - DNA, 31 bp, Artificial Sequence
  Description of Artificial Sequence:  Enzymatic Nucleic Acid
ttcgtaaaggctagctacaacgactggggtt

SEQ ID NO: 16846 - DNA, 31 bp, Artificial Sequence
  Description of Artificial Sequence:  Enzymatic Nucleic Acid
ccttttcgggctagctacaacgaaaatctgg

SEQ ID NO: 16847 - DNA, 31 bp, Artificial Sequence
  Description of Artificial Sequence:  Enzymatic Nucleic Acid
tgacacggggctagctacaacgacttttcgt

SEQ ID NO: 16848 - DNA, 31 bp, Artificial Sequence
  Description of Artificial Sequence:  Enzymatic Nucleic Acid
cgatgacaggctagctacaacgaggcctttt

SEQ ID NO: 16849 - DNA, 31 bp, Artificial Sequence
  Description of Artificial Sequence:  Enzymatic Nucleic Acid
aacgatgaggctagctacaacgaacggcctt

SEQ ID NO: 16850 - DNA, 31 bp, Artificial Sequence
  Description of Artificial Sequence:  Enzymatic Nucleic Acid
ggaaacgaggctagctacaacgagacacggc

SEQ ID NO: 16851 - DNA, 31 bp, Artificial Sequence
  Description of Artificial Sequence:  Enzymatic Nucleic Acid
tctggaaaggctagctacaacgagatgacac

SEQ ID NO: 16852 - DNA, 31 bp, Artificial Sequence
  Description of Artificial Sequence:  Enzymatic Nucleic Acid
gagccgggggctagctacaacgactggaaac

SEQ ID NO: 16853 - DNA, 31 bp, Artificial Sequence
  Description of Artificial Sequence:  Enzymatic Nucleic Acid
gtagagagggctagctacaacgacgggtctg

SEQ ID NO: 16854 - DNA, 31 bp, Artificial Sequence
  Description of Artificial Sequence:  Enzymatic Nucleic Acid
ccagtgggggctagctacaacgaagagagcc

SEQ ID NO: 16855 - DNA, 31 bp, Artificial Sequence
  Description of Artificial Sequence:  Enzymatic Nucleic Acid
ctgcccagggctagctacaacgagggtagag

SEQ ID NO: 16856 - DNA, 31 bp, Artificial Sequence
  Description of Artificial Sequence:  Enzymatic Nucleic Acid
gtctgctgggctagctacaacgaccagtggg

SEQ ID NO: 16857 - DNA, 31 bp, Artificial Sequence
  Description of Artificial Sequence:  Enzymatic Nucleic Acid
tttgtctgggctagctacaacgatgcccagt

SEQ ID NO: 16858 - DNA, 31 bp, Artificial Sequence
  Description of Artificial Sequence:  Enzymatic Nucleic Acid
aggatttgggctagctacaacgactgctgcc

SEQ ID NO: 16859 - DNA, 31 bp, Artificial Sequence
  Description of Artificial Sequence:  Enzymatic Nucleic Acid
agtcaggaggctagctacaacgattgtctgc

SEQ ID NO: 16860 - DNA, 31 bp, Artificial Sequence
  Description of Artificial Sequence:  Enzymatic Nucleic Acid
ggtacaagggctagctacaacgacaggattt

SEQ ID NO: 16861 - DNA, 31 bp, Artificial Sequence
  Description of Artificial Sequence:  Enzymatic Nucleic Acid
atgcggtaggctagctacaacgaaagtcagg

SEQ ID NO: 16862 - DNA, 31 bp, Artificial Sequence
  Description of Artificial Sequence:  Enzymatic Nucleic Acid
atatgcggggctagctacaacgaacaagtca

SEQ ID NO: 16863 - DNA, 31 bp, Artificial Sequence
  Description of Artificial Sequence:  Enzymatic Nucleic Acid
accatatgggctagctacaacgaggtacaag

SEQ ID NO: 16864 - DNA, 31 bp, Artificial Sequence
  Description of Artificial Sequence:  Enzymatic Nucleic Acid
ataccataggctagctacaacgagcggtaca

SEQ ID NO: 16865 - DNA, 31 bp, Artificial Sequence
  Description of Artificial Sequence:  Enzymatic Nucleic Acid
ggataccaggctagctacaacgaatgcggta

SEQ ID NO: 16866 - DNA, 31 bp, Artificial Sequence
  Description of Artificial Sequence:  Enzymatic Nucleic Acid
gagggataggctagctacaacgacatatgcg

SEQ ID NO: 16867 - DNA, 31 bp, Artificial Sequence
  Description of Artificial Sequence:  Enzymatic Nucleic Acid
ttgagggaggctagctacaacgaaccatatg

SEQ ID NO: 16868 - DNA, 31 bp, Artificial Sequence
  Description of Artificial Sequence:  Enzymatic Nucleic Acid
attgtaggggctagctacaacgatgagggat

SEQ ID NO: 16869 - DNA, 31 bp, Artificial Sequence
  Description of Artificial Sequence:  Enzymatic Nucleic Acid
cttgattgggctagctacaacgaaggttgag

SEQ ID NO: 16870 - DNA, 31 bp, Artificial Sequence
  Description of Artificial Sequence:  Enzymatic Nucleic Acid
ccacttgaggctagctacaacgatgtaggtt

SEQ ID NO: 16871 - DNA, 31 bp, Artificial Sequence
  Description of Artificial Sequence:  Enzymatic Nucleic Acid
cagaaccaggctagctacaacgattgattgt

SEQ ID NO: 16872 - DNA, 31 bp, Artificial Sequence
  Description of Artificial Sequence:  Enzymatic Nucleic Acid
tgccagaaggctagctacaacgacacttgat

SEQ ID NO: 16873 - DNA, 31 bp, Artificial Sequence
  Description of Artificial Sequence:  Enzymatic Nucleic Acid
caggggtgggctagctacaacgacagaacca

SEQ ID NO: 16874 - DNA, 31 bp, Artificial Sequence
  Description of Artificial Sequence:  Enzymatic Nucleic Acid
tacaggggggctagctacaacgagccagaac

SEQ ID NO: 16875 - DNA, 31 bp, Artificial Sequence
  Description of Artificial Sequence:  Enzymatic Nucleic Acid
tatggttaggctagctacaacgaaggggtgc

SEQ ID NO: 16876 - DNA, 31 bp, Artificial Sequence
  Description of Artificial Sequence:  Enzymatic Nucleic Acid
gattatggggctagctacaacgatacagggg

SEQ ID NO: 16877 - DNA, 31 bp, Artificial Sequence
  Description of Artificial Sequence:  Enzymatic Nucleic Acid
aatgattaggctagctacaacgaggttacag

SEQ ID NO: 16878 - DNA, 31 bp, Artificial Sequence
  Description of Artificial Sequence:  Enzymatic Nucleic Acid
cggaatgaggctagctacaacgatatggtta

SEQ ID NO: 16879 - DNA, 31 bp, Artificial Sequence
  Description of Artificial Sequence:  Enzymatic Nucleic Acid
cttcggaaggctagctacaacgagattatgg

SEQ ID NO: 16880 - DNA, 31 bp, Artificial Sequence
  Description of Artificial Sequence:  Enzymatic Nucleic Acid
acaccttgggctagctacaacgattcggaat

SEQ ID NO: 16881 - DNA, 31 bp, Artificial Sequence
  Description of Artificial Sequence:  Enzymatic Nucleic Acid
aagtcacaggctagctacaacgacttgcttc

SEQ ID NO: 16882 - DNA, 31 bp, Artificial Sequence
  Description of Artificial Sequence:  Enzymatic Nucleic Acid
aaaagtcaggctagctacaacgaaccttgct

SEQ ID NO: 16883 - DNA, 31 bp, Artificial Sequence
  Description of Artificial Sequence:  Enzymatic Nucleic Acid
aacaaaagggctagctacaacgacacacctt

SEQ ID NO: 16884 - DNA, 31 bp, Artificial Sequence
  Description of Artificial Sequence:  Enzymatic Nucleic Acid
tattggaaggctagctacaacgaaaaagtca

SEQ ID NO: 16885 - DNA, 31 bp, Artificial Sequence
  Description of Artificial Sequence:  Enzymatic Nucleic Acid
cttcattaggctagctacaacgatggaacaa

SEQ ID NO: 16886 - DNA, 31 bp, Artificial Sequence
  Description of Artificial Sequence:  Enzymatic Nucleic Acid
actcttcaggctagctacaacgatattggaa

SEQ ID NO: 16887 - DNA, 31 bp, Artificial Sequence
  Description of Artificial Sequence:  Enzymatic Nucleic Acid
ataaaggaggctagctacaacgatcttcatt

SEQ ID NO: 16888 - DNA, 31 bp, Artificial Sequence
  Description of Artificial Sequence:  Enzymatic Nucleic Acid
atccaggaggctagctacaacgaaaaggact

SEQ ID NO: 16889 - DNA, 31 bp, Artificial Sequence
  Description of Artificial Sequence:  Enzymatic Nucleic Acid
tgtcagcaggctagctacaacgaccaggata

SEQ ID NO: 16890 - DNA, 31 bp, Artificial Sequence
  Description of Artificial Sequence:  Enzymatic Nucleic Acid
gctgtcagggctagctacaacgaatccagga

SEQ ID NO: 16891 - DNA, 31 bp, Artificial Sequence
  Description of Artificial Sequence:  Enzymatic Nucleic Acid
tgttgctgggctagctacaacgacagcatcc

SEQ ID NO: 16892 - DNA, 31 bp, Artificial Sequence
  Description of Artificial Sequence:  Enzymatic Nucleic Acid
ccatgttgggctagctacaacgatgtcagca

SEQ ID NO: 16893 - DNA, 31 bp, Artificial Sequence
  Description of Artificial Sequence:  Enzymatic Nucleic Acid
ttcccatgggctagctacaacgatgctgtca

SEQ ID NO: 16894 - DNA, 31 bp, Artificial Sequence
  Description of Artificial Sequence:  Enzymatic Nucleic Acid
gtttcccaggctagctacaacgagttgctgt

SEQ ID NO: 16895 - DNA, 31 bp, Artificial Sequence
  Description of Artificial Sequence:  Enzymatic Nucleic Acid
caattctgggctagctacaacgattcccatg

SEQ ID NO: 16896 - DNA, 31 bp, Artificial Sequence
  Description of Artificial Sequence:  Enzymatic Nucleic Acid
gctctcaaggctagctacaacgatctgtttc

SEQ ID NO: 16897 - DNA, 31 bp, Artificial Sequence
  Description of Artificial Sequence:  Enzymatic Nucleic Acid
gagtgatgggctagctacaacgatctcaatt

SEQ ID NO: 16898 - DNA, 31 bp, Artificial Sequence
  Description of Artificial Sequence:  Enzymatic Nucleic Acid
ctgagtgaggctagctacaacgagctctcaa

SEQ ID NO: 16899 - DNA, 31 bp, Artificial Sequence
  Description of Artificial Sequence:  Enzymatic Nucleic Acid
gcgctgagggctagctacaacgagatgctct

SEQ ID NO: 16900 - DNA, 31 bp, Artificial Sequence
  Description of Artificial Sequence:  Enzymatic Nucleic Acid
gccatgcgggctagctacaacgatgagtgat

SEQ ID NO: 16901 - DNA, 31 bp, Artificial Sequence
  Description of Artificial Sequence:  Enzymatic Nucleic Acid
ttgccatgggctagctacaacgagctgagtg

SEQ ID NO: 16902 - DNA, 31 bp, Artificial Sequence
  Description of Artificial Sequence:  Enzymatic Nucleic Acid
tattgccaggctagctacaacgagcgctgag

SEQ ID NO: 16903 - DNA, 31 bp, Artificial Sequence
  Description of Artificial Sequence:  Enzymatic Nucleic Acid
tattattgggctagctacaacgacatgcgct

SEQ ID NO: 16904 - DNA, 31 bp, Artificial Sequence
  Description of Artificial Sequence:  Enzymatic Nucleic Acid
ttctattaggctagctacaacgatgccatgc

SEQ ID NO: 16905 - DNA, 31 bp, Artificial Sequence
  Description of Artificial Sequence:  Enzymatic Nucleic Acid
tccttctaggctagctacaacgatattgcca

SEQ ID NO: 16906 - DNA, 31 bp, Artificial Sequence
  Description of Artificial Sequence:  Enzymatic Nucleic Acid
ccatcttaggctagctacaacgatctttcct

SEQ ID NO: 16907 - DNA, 31 bp, Artificial Sequence
  Description of Artificial Sequence:  Enzymatic Nucleic Acid
gctagccaggctagctacaacgacttattct

SEQ ID NO: 16908 - DNA, 31 bp, Artificial Sequence
  Description of Artificial Sequence:  Enzymatic Nucleic Acid
ggtgctagggctagctacaacgacatcttat

SEQ ID NO: 16909 - DNA, 31 bp, Artificial Sequence
  Description of Artificial Sequence:  Enzymatic Nucleic Acid
ccaaggtgggctagctacaacgatagccatc

SEQ ID NO: 16910 - DNA, 31 bp, Artificial Sequence
  Description of Artificial Sequence:  Enzymatic Nucleic Acid
aaccaaggggctagctacaacgagctagcca

SEQ ID NO: 16911 - DNA, 31 bp, Artificial Sequence
  Description of Artificial Sequence:  Enzymatic Nucleic Acid
agccacaaggctagctacaacgacaaggtgc

SEQ ID NO: 16912 - DNA, 31 bp, Artificial Sequence
  Description of Artificial Sequence:  Enzymatic Nucleic Acid
gtcagccaggctagctacaacgaaaccaagg

SEQ ID NO: 16913 - DNA, 31 bp, Artificial Sequence
  Description of Artificial Sequence:  Enzymatic Nucleic Acid
agagtcagggctagctacaacgacacaacca

SEQ ID NO: 16914 - DNA, 31 bp, Artificial Sequence
  Description of Artificial Sequence:  Enzymatic Nucleic Acid
ttctagagggctagctacaacgacagccaca

SEQ ID NO: 16915 - DNA, 31 bp, Artificial Sequence
  Description of Artificial Sequence:  Enzymatic Nucleic Acid
tccagaaaggctagctacaacgatctagagt

SEQ ID NO: 16916 - DNA, 31 bp, Artificial Sequence
  Description of Artificial Sequence:  Enzymatic Nucleic Acid
aatgtagaggctagctacaacgatccagaaa

SEQ ID NO: 16917 - DNA, 31 bp, Artificial Sequence
  Description of Artificial Sequence:  Enzymatic Nucleic Acid
tgcaaatgggctagctacaacgaagattcca

SEQ ID NO: 16918 - DNA, 31 bp, Artificial Sequence
  Description of Artificial Sequence:  Enzymatic Nucleic Acid
tatgcaaaggctagctacaacgagtagattc

SEQ ID NO: 16919 - DNA, 31 bp, Artificial Sequence
  Description of Artificial Sequence:  Enzymatic Nucleic Acid
aagctatgggctagctacaacgaaaatgtag

SEQ ID NO: 16920 - DNA, 31 bp, Artificial Sequence
  Description of Artificial Sequence:  Enzymatic Nucleic Acid
ggaagctaggctagctacaacgagcaaatgt

SEQ ID NO: 16921 - DNA, 31 bp, Artificial Sequence
  Description of Artificial Sequence:  Enzymatic Nucleic Acid
attggaagggctagctacaacgatatgcaaa

SEQ ID NO: 16922 - DNA, 31 bp, Artificial Sequence
  Description of Artificial Sequence:  Enzymatic Nucleic Acid
caactttaggctagctacaacgatggaagct

SEQ ID NO: 16923 - DNA, 31 bp, Artificial Sequence
  Description of Artificial Sequence:  Enzymatic Nucleic Acid
agtcccaaggctagctacaacgatttattgg

SEQ ID NO: 16924 - DNA, 31 bp, Artificial Sequence
  Description of Artificial Sequence:  Enzymatic Nucleic Acid
tcccacagggctagctacaacgacccaactt

SEQ ID NO: 16925 - DNA, 31 bp, Artificial Sequence
  Description of Artificial Sequence:  Enzymatic Nucleic Acid
tcttcccaggctagctacaacgaagtcccaa

SEQ ID NO: 16926 - DNA, 31 bp, Artificial Sequence
  Description of Artificial Sequence:  Enzymatic Nucleic Acid
agcttatgggctagctacaacgattcttccc

SEQ ID NO: 16927 - DNA, 31 bp, Artificial Sequence
  Description of Artificial Sequence:  Enzymatic Nucleic Acid
aaagcttaggctagctacaacgagtttcttc

SEQ ID NO: 16928 - DNA, 31 bp, Artificial Sequence
  Description of Artificial Sequence:  Enzymatic Nucleic Acid
tataaaagggctagctacaacgattatgttt

SEQ ID NO: 16929 - DNA, 31 bp, Artificial Sequence
  Description of Artificial Sequence:  Enzymatic Nucleic Acid
ctgtgataggctagctacaacgaaaaagctt

SEQ ID NO: 16930 - DNA, 31 bp, Artificial Sequence
  Description of Artificial Sequence:  Enzymatic Nucleic Acid
atctgtgaggctagctacaacgaataaaagc

SEQ ID NO: 16931 - DNA, 31 bp, Artificial Sequence
  Description of Artificial Sequence:  Enzymatic Nucleic Acid
cacatctgggctagctacaacgagatataaa

SEQ ID NO: 16932 - DNA, 31 bp, Artificial Sequence
  Description of Artificial Sequence:  Enzymatic Nucleic Acid
ttggcacaggctagctacaacgactgtgata

SEQ ID NO: 16933 - DNA, 31 bp, Artificial Sequence
  Description of Artificial Sequence:  Enzymatic Nucleic Acid
atttggcaggctagctacaacgaatctgtga

SEQ ID NO: 16934 - DNA, 31 bp, Artificial Sequence
  Description of Artificial Sequence:  Enzymatic Nucleic Acid
ccatttggggctagctacaacgaacatctgt

SEQ ID NO: 16935 - DNA, 31 bp, Artificial Sequence
  Description of Artificial Sequence:  Enzymatic Nucleic Acid
gaaacccaggctagctacaacgattggcaca

SEQ ID NO: 16936 - DNA, 31 bp, Artificial Sequence
  Description of Artificial Sequence:  Enzymatic Nucleic Acid
acatgaaaggctagctacaacgaccatttgg

SEQ ID NO: 16937 - DNA, 31 bp, Artificial Sequence
  Description of Artificial Sequence:  Enzymatic Nucleic Acid
agttaacaggctagctacaacgagaaaccca

SEQ ID NO: 16938 - DNA, 31 bp, Artificial Sequence
  Description of Artificial Sequence:  Enzymatic Nucleic Acid
caagttaaggctagctacaacgaatgaaacc

SEQ ID NO: 16939 - DNA, 31 bp, Artificial Sequence
  Description of Artificial Sequence:  Enzymatic Nucleic Acid
tttccaagggctagctacaacgataacatga

SEQ ID NO: 16940 - DNA, 31 bp, Artificial Sequence
  Description of Artificial Sequence:  Enzymatic Nucleic Acid
cgtcggcaggctagctacaacgatttttcca

SEQ ID NO: 16941 - DNA, 31 bp, Artificial Sequence
  Description of Artificial Sequence:  Enzymatic Nucleic Acid
tccgtcggggctagctacaacgaattttttc

SEQ ID NO: 16942 - DNA, 31 bp, Artificial Sequence
  Description of Artificial Sequence:  Enzymatic Nucleic Acid
tccttccgggctagctacaacgacggcattt

SEQ ID NO: 16943 - DNA, 31 bp, Artificial Sequence
  Description of Artificial Sequence:  Enzymatic Nucleic Acid
gtttcaggggctagctacaacgacctctcct

SEQ ID NO: 16944 - DNA, 31 bp, Artificial Sequence
  Description of Artificial Sequence:  Enzymatic Nucleic Acid
caagacagggctagctacaacgattcaggtc

SEQ ID NO: 16945 - DNA, 31 bp, Artificial Sequence
  Description of Artificial Sequence:  Enzymatic Nucleic Acid
gtgcaagaggctagctacaacgaagtttcag

SEQ ID NO: 16946 - DNA, 31 bp, Artificial Sequence
  Description of Artificial Sequence:  Enzymatic Nucleic Acid
taactgtgggctagctacaacgaaagacagt

SEQ ID NO: 16947 - DNA, 31 bp, Artificial Sequence
  Description of Artificial Sequence:  Enzymatic Nucleic Acid
gttaactgggctagctacaacgagcaagaca

SEQ ID NO: 16948 - DNA, 31 bp, Artificial Sequence
  Description of Artificial Sequence:  Enzymatic Nucleic Acid
cttgttaaggctagctacaacgatgtgcaag

SEQ ID NO: 16949 - DNA, 31 bp, Artificial Sequence
  Description of Artificial Sequence:  Enzymatic Nucleic Acid
agaacttgggctagctacaacgataactgtg

SEQ ID NO: 16950 - DNA, 31 bp, Artificial Sequence
  Description of Artificial Sequence:  Enzymatic Nucleic Acid
tataagaaggctagctacaacgattgttaac

SEQ ID NO: 16951 - DNA, 31 bp, Artificial Sequence
  Description of Artificial Sequence:  Enzymatic Nucleic Acid
tctctgtaggctagctacaacgaaagaactt

SEQ ID NO: 16952 - DNA, 31 bp, Artificial Sequence
  Description of Artificial Sequence:  Enzymatic Nucleic Acid
cgtctctgggctagctacaacgaataagaac

SEQ ID NO: 16953 - DNA, 31 bp, Artificial Sequence
  Description of Artificial Sequence:  Enzymatic Nucleic Acid
aagtaacgggctagctacaacgactctgtat

SEQ ID NO: 16954 - DNA, 31 bp, Artificial Sequence
  Description of Artificial Sequence:  Enzymatic Nucleic Acid
ccaagtaaggctagctacaacgagtctctgt

SEQ ID NO: 16955 - DNA, 31 bp, Artificial Sequence
  Description of Artificial Sequence:  Enzymatic Nucleic Acid
aatccaagggctagctacaacgaaacgtctc

SEQ ID NO: 16956 - DNA, 31 bp, Artificial Sequence
  Description of Artificial Sequence:  Enzymatic Nucleic Acid
cagtaaaaggctagctacaacgaccaagtaa

SEQ ID NO: 16957 - DNA, 31 bp, Artificial Sequence
  Description of Artificial Sequence:  Enzymatic Nucleic Acid
gtccgcagggctagctacaacgaaaaatcca

SEQ ID NO: 16958 - DNA, 31 bp, Artificial Sequence
  Description of Artificial Sequence:  Enzymatic Nucleic Acid
actgtccgggctagctacaacgaagtaaaat

SEQ ID NO: 16959 - DNA, 31 bp, Artificial Sequence
  Description of Artificial Sequence:  Enzymatic Nucleic Acid
attaactgggctagctacaacgaccgcagta

SEQ ID NO: 16960 - DNA, 31 bp, Artificial Sequence
  Description of Artificial Sequence:  Enzymatic Nucleic Acid
gttattaaggctagctacaacgatgtccgca

SEQ ID NO: 16961 - DNA, 31 bp, Artificial Sequence
  Description of Artificial Sequence:  Enzymatic Nucleic Acid
ttctgttaggctagctacaacgataactgtc

SEQ ID NO: 16962 - DNA, 31 bp, Artificial Sequence
  Description of Artificial Sequence:  Enzymatic Nucleic Acid
ttgttctgggctagctacaacgatattaact

SEQ ID NO: 16963 - DNA, 31 bp, Artificial Sequence
  Description of Artificial Sequence:  Enzymatic Nucleic Acid
gtgcattgggctagctacaacgatctgttat

SEQ ID NO: 16964 - DNA, 31 bp, Artificial Sequence
  Description of Artificial Sequence:  Enzymatic Nucleic Acid
gtagtgcaggctagctacaacgatgttctgt

SEQ ID NO: 16965 - DNA, 31 bp, Artificial Sequence
  Description of Artificial Sequence:  Enzymatic Nucleic Acid
ctgtagtgggctagctacaacgaattgttct

SEQ ID NO: 16966 - DNA, 31 bp, Artificial Sequence
  Description of Artificial Sequence:  Enzymatic Nucleic Acid
tactgtagggctagctacaacgagcattgtt

SEQ ID NO: 16967 - DNA, 31 bp, Artificial Sequence
  Description of Artificial Sequence:  Enzymatic Nucleic Acid
taatactgggctagctacaacgaagtgcatt

SEQ ID NO: 16968 - DNA, 31 bp, Artificial Sequence
  Description of Artificial Sequence:  Enzymatic Nucleic Acid
tgctaataggctagctacaacgatgtagtgc

SEQ ID NO: 16969 - DNA, 31 bp, Artificial Sequence
  Description of Artificial Sequence:  Enzymatic Nucleic Acid
cttgctaaggctagctacaacgaactgtagt

SEQ ID NO: 16970 - DNA, 31 bp, Artificial Sequence
  Description of Artificial Sequence:  Enzymatic Nucleic Acid
tttgcttgggctagctacaacgataatactg

SEQ ID NO: 16971 - DNA, 31 bp, Artificial Sequence
  Description of Artificial Sequence:  Enzymatic Nucleic Acid
attttttgggctagctacaacgattgctaat

SEQ ID NO: 16972 - DNA, 31 bp, Artificial Sequence
  Description of Artificial Sequence:  Enzymatic Nucleic Acid
gatggccaggctagctacaacgatttttgct

SEQ ID NO: 16973 - DNA, 31 bp, Artificial Sequence
  Description of Artificial Sequence:  Enzymatic Nucleic Acid
agtgatggggctagctacaacgacatttttt

SEQ ID NO: 16974 - DNA, 31 bp, Artificial Sequence
  Description of Artificial Sequence:  Enzymatic Nucleic Acid
cttagtgaggctagctacaacgaggccattt

SEQ ID NO: 16975 - DNA, 31 bp, Artificial Sequence
  Description of Artificial Sequence:  Enzymatic Nucleic Acid
ctccttagggctagctacaacgagatggcca

SEQ ID NO: 16976 - DNA, 31 bp, Artificial Sequence
  Description of Artificial Sequence:  Enzymatic Nucleic Acid
atggagtgggctagctacaacgatccttagt

SEQ ID NO: 16977 - DNA, 31 bp, Artificial Sequence
  Description of Artificial Sequence:  Enzymatic Nucleic Acid
tgatggagggctagctacaacgagctcctta

SEQ ID NO: 16978 - DNA, 31 bp, Artificial Sequence
  Description of Artificial Sequence:  Enzymatic Nucleic Acid
aagagtgaggctagctacaacgaggagtgct

SEQ ID NO: 16979 - DNA, 31 bp, Artificial Sequence
  Description of Artificial Sequence:  Enzymatic Nucleic Acid
attaagagggctagctacaacgagatggagt

SEQ ID NO: 16980 - DNA, 31 bp, Artificial Sequence
  Description of Artificial Sequence:  Enzymatic Nucleic Acid
tggtaagaggctagctacaacgataagagtg

SEQ ID NO: 16981 - DNA, 31 bp, Artificial Sequence
  Description of Artificial Sequence:  Enzymatic Nucleic Acid
catgatggggctagctacaacgaaagattaa

SEQ ID NO: 16982 - DNA, 31 bp, Artificial Sequence
  Description of Artificial Sequence:  Enzymatic Nucleic Acid
attcatgaggctagctacaacgaggtaagat

SEQ ID NO: 16983 - DNA, 31 bp, Artificial Sequence
  Description of Artificial Sequence:  Enzymatic Nucleic Acid
aacattcaggctagctacaacgagatggtaa

SEQ ID NO: 16984 - DNA, 31 bp, Artificial Sequence
  Description of Artificial Sequence:  Enzymatic Nucleic Acid
gggaaacaggctagctacaacgatcatgatg

SEQ ID NO: 16985 - DNA, 31 bp, Artificial Sequence
  Description of Artificial Sequence:  Enzymatic Nucleic Acid
cagggaaaggctagctacaacgaattcatga

SEQ ID NO: 16986 - DNA, 31 bp, Artificial Sequence
  Description of Artificial Sequence:  Enzymatic Nucleic Acid
gaatcttgggctagctacaacgaagggaaac

SEQ ID NO: 16987 - DNA, 31 bp, Artificial Sequence
  Description of Artificial Sequence:  Enzymatic Nucleic Acid
tgcctgaaggctagctacaacgacttgcagg

SEQ ID NO: 16988 - DNA, 31 bp, Artificial Sequence
  Description of Artificial Sequence:  Enzymatic Nucleic Acid
cataggtgggctagctacaacgactgaatct

SEQ ID NO: 16989 - DNA, 31 bp, Artificial Sequence
  Description of Artificial Sequence:  Enzymatic Nucleic Acid
ggcataggggctagctacaacgagcctgaat

SEQ ID NO: 16990 - DNA, 31 bp, Artificial Sequence
  Description of Artificial Sequence:  Enzymatic Nucleic Acid
tgcaggcaggctagctacaacgaaggtgcct

SEQ ID NO: 16991 - DNA, 31 bp, Artificial Sequence
  Description of Artificial Sequence:  Enzymatic Nucleic Acid
tctgcaggggctagctacaacgaataggtgc

SEQ ID NO: 16992 - DNA, 31 bp, Artificial Sequence
  Description of Artificial Sequence:  Enzymatic Nucleic Acid
tggctctgggctagctacaacgaaggcatag

SEQ ID NO: 16993 - DNA, 31 bp, Artificial Sequence
  Description of Artificial Sequence:  Enzymatic Nucleic Acid
attcctggggctagctacaacgatctgcagg

SEQ ID NO: 16994 - DNA, 31 bp, Artificial Sequence
  Description of Artificial Sequence:  Enzymatic Nucleic Acid
tgtatacaggctagctacaacgatcctggct

SEQ ID NO: 16995 - DNA, 31 bp, Artificial Sequence
  Description of Artificial Sequence:  Enzymatic Nucleic Acid
tgtgtataggctagctacaacgaattcctgg

SEQ ID NO: 16996 - DNA, 31 bp, Artificial Sequence
  Description of Artificial Sequence:  Enzymatic Nucleic Acid
cctgtgtaggctagctacaacgaacattcct

SEQ ID NO: 16997 - DNA, 31 bp, Artificial Sequence
  Description of Artificial Sequence:  Enzymatic Nucleic Acid
cccctgtgggctagctacaacgaatacattc

SEQ ID NO: 16998 - DNA, 31 bp, Artificial Sequence
  Description of Artificial Sequence:  Enzymatic Nucleic Acid
ttcccctgggctagctacaacgagtatacat

SEQ ID NO: 16999 - DNA, 31 bp, Artificial Sequence
  Description of Artificial Sequence:  Enzymatic Nucleic Acid
ctggaggaggctagctacaacgattcttccc

SEQ ID NO: 17000 - DNA, 31 bp, Artificial Sequence
  Description of Artificial Sequence:  Enzymatic Nucleic Acid
gattgtaaggctagctacaacgattctttct

SEQ ID NO: 17001 - DNA, 31 bp, Artificial Sequence
  Description of Artificial Sequence:  Enzymatic Nucleic Acid
tctgattgggctagctacaacgaaatttctt

SEQ ID NO: 17002 - DNA, 31 bp, Artificial Sequence
  Description of Artificial Sequence:  Enzymatic Nucleic Acid
atctctgaggctagctacaacgatgtaattt

SEQ ID NO: 17003 - DNA, 31 bp, Artificial Sequence
  Description of Artificial Sequence:  Enzymatic Nucleic Acid
cttcctgaggctagctacaacgactctgatt

SEQ ID NO: 17004 - DNA, 31 bp, Artificial Sequence
  Description of Artificial Sequence:  Enzymatic Nucleic Acid
gtatggtgggctagctacaacgattcctgat

SEQ ID NO: 17005 - DNA, 31 bp, Artificial Sequence
  Description of Artificial Sequence:  Enzymatic Nucleic Acid
aggtatggggctagctacaacgagcttcctg

SEQ ID NO: 17006 - DNA, 31 bp, Artificial Sequence
  Description of Artificial Sequence:  Enzymatic Nucleic Acid
aggaggtaggctagctacaacgaggtgcttc

SEQ ID NO: 17007 - DNA, 31 bp, Artificial Sequence
  Description of Artificial Sequence:  Enzymatic Nucleic Acid
gcaggaggggctagctacaacgaatggtgct

SEQ ID NO: 17008 - DNA, 31 bp, Artificial Sequence
  Description of Artificial Sequence:  Enzymatic Nucleic Acid
aggtttcgggctagctacaacgaaggaggta

SEQ ID NO: 17009 - DNA, 31 bp, Artificial Sequence
  Description of Artificial Sequence:  Enzymatic Nucleic Acid
cactgaggggctagctacaacgattcgcagg

SEQ ID NO: 17010 - DNA, 31 bp, Artificial Sequence
  Description of Artificial Sequence:  Enzymatic Nucleic Acid
tgtgatcaggctagctacaacgatgaggttt

SEQ ID NO: 17011 - DNA, 31 bp, Artificial Sequence
  Description of Artificial Sequence:  Enzymatic Nucleic Acid
ctgtgtgaggctagctacaacgacactgagg

SEQ ID NO: 17012 - DNA, 31 bp, Artificial Sequence
  Description of Artificial Sequence:  Enzymatic Nucleic Acid
ccactgtgggctagctacaacgagatcactg

SEQ ID NO: 17013 - DNA, 31 bp, Artificial Sequence
  Description of Artificial Sequence:  Enzymatic Nucleic Acid
ggccactgggctagctacaacgagtgatcac

SEQ ID NO: 17014 - DNA, 31 bp, Artificial Sequence
  Description of Artificial Sequence:  Enzymatic Nucleic Acid
gatggccaggctagctacaacgatgtgtgat

SEQ ID NO: 17015 - DNA, 31 bp, Artificial Sequence
  Description of Artificial Sequence:  Enzymatic Nucleic Acid
gctgatggggctagctacaacgacactgtgt

SEQ ID NO: 17016 - DNA, 31 bp, Artificial Sequence
  Description of Artificial Sequence:  Enzymatic Nucleic Acid
actgctgaggctagctacaacgaggccactg

SEQ ID NO: 17017 - DNA, 31 bp, Artificial Sequence
  Description of Artificial Sequence:  Enzymatic Nucleic Acid
tggaactgggctagctacaacgatgatggcc

SEQ ID NO: 17018 - DNA, 31 bp, Artificial Sequence
  Description of Artificial Sequence:  Enzymatic Nucleic Acid
tggtggaaggctagctacaacgatgctgatg

SEQ ID NO: 17019 - DNA, 31 bp, Artificial Sequence
  Description of Artificial Sequence:  Enzymatic Nucleic Acid
taaagtggggctagctacaacgaggaactgc

SEQ ID NO: 17020 - DNA, 31 bp, Artificial Sequence
  Description of Artificial Sequence:  Enzymatic Nucleic Acid
gtctaaagggctagctacaacgaggtggaac

SEQ ID NO: 17021 - DNA, 31 bp, Artificial Sequence
  Description of Artificial Sequence:  Enzymatic Nucleic Acid
catgacagggctagctacaacgactaaagtg

SEQ ID NO: 17022 - DNA, 31 bp, Artificial Sequence
  Description of Artificial Sequence:  Enzymatic Nucleic Acid
tagcatgaggctagctacaacgaagtctaaa

SEQ ID NO: 17023 - DNA, 31 bp, Artificial Sequence
  Description of Artificial Sequence:  Enzymatic Nucleic Acid
cattagcaggctagctacaacgagacagtct

SEQ ID NO: 17024 - DNA, 31 bp, Artificial Sequence
  Description of Artificial Sequence:  Enzymatic Nucleic Acid
accattagggctagctacaacgaatgacagt

SEQ ID NO: 17025 - DNA, 31 bp, Artificial Sequence
  Description of Artificial Sequence:  Enzymatic Nucleic Acid
ggacaccaggctagctacaacgatagcatga

SEQ ID NO: 17026 - DNA, 31 bp, Artificial Sequence
  Description of Artificial Sequence:  Enzymatic Nucleic Acid
cggggacaggctagctacaacgacattagca

SEQ ID NO: 17027 - DNA, 31 bp, Artificial Sequence
  Description of Artificial Sequence:  Enzymatic Nucleic Acid
ctcggggaggctagctacaacgaaccattag

SEQ ID NO: 17028 - DNA, 31 bp, Artificial Sequence
  Description of Artificial Sequence:  Enzymatic Nucleic Acid
atctgaggggctagctacaacgatcggggac

SEQ ID NO: 17029 - DNA, 31 bp, Artificial Sequence
  Description of Artificial Sequence:  Enzymatic Nucleic Acid
ccaagtgaggctagctacaacgactgaggct

SEQ ID NO: 17030 - DNA, 31 bp, Artificial Sequence
  Description of Artificial Sequence:  Enzymatic Nucleic Acid
aaaccaagggctagctacaacgagatctgag

SEQ ID NO: 17031 - DNA, 31 bp, Artificial Sequence
  Description of Artificial Sequence:  Enzymatic Nucleic Acid
tttttaaaggctagctacaacgacaagtgat

SEQ ID NO: 17032 - DNA, 31 bp, Artificial Sequence
  Description of Artificial Sequence:  Enzymatic Nucleic Acid
tgtggttgggctagctacaacgattttaaac

SEQ ID NO: 17033 - DNA, 31 bp, Artificial Sequence
  Description of Artificial Sequence:  Enzymatic Nucleic Acid
ttttgtggggctagctacaacgatgttttta

SEQ ID NO: 17034 - DNA, 31 bp, Artificial Sequence
  Description of Artificial Sequence:  Enzymatic Nucleic Acid
gtattttgggctagctacaacgaggttgttt

SEQ ID NO: 17035 - DNA, 31 bp, Artificial Sequence
  Description of Artificial Sequence:  Enzymatic Nucleic Acid
ttgttgtaggctagctacaacgatttgtggt

SEQ ID NO: 17036 - DNA, 31 bp, Artificial Sequence
  Description of Artificial Sequence:  Enzymatic Nucleic Acid
tcttgttgggctagctacaacgaattttgtg

SEQ ID NO: 17037 - DNA, 31 bp, Artificial Sequence
  Description of Artificial Sequence:  Enzymatic Nucleic Acid
ggctcttgggctagctacaacgatgtatttt

SEQ ID NO: 17038 - DNA, 31 bp, Artificial Sequence
  Description of Artificial Sequence:  Enzymatic Nucleic Acid
attccaggggctagctacaacgatcttgttg

SEQ ID NO: 17039 - DNA, 31 bp, Artificial Sequence
  Description of Artificial Sequence:  Enzymatic Nucleic Acid
taaaataaggctagctacaacgatccaggct

SEQ ID NO: 17040 - DNA, 31 bp, Artificial Sequence
  Description of Artificial Sequence:  Enzymatic Nucleic Acid
tcctaaaaggctagctacaacgaaattccag

SEQ ID NO: 17041 - DNA, 31 bp, Artificial Sequence
  Description of Artificial Sequence:  Enzymatic Nucleic Acid
cttcctggggctagctacaacgacctaaaat

SEQ ID NO: 17042 - DNA, 31 bp, Artificial Sequence
  Description of Artificial Sequence:  Enzymatic Nucleic Acid
gcgtgctgggctagctacaacgattcctggt

SEQ ID NO: 17043 - DNA, 31 bp, Artificial Sequence
  Description of Artificial Sequence:  Enzymatic Nucleic Acid
acagcgtgggctagctacaacgatgcttcct

SEQ ID NO: 17044 - DNA, 31 bp, Artificial Sequence
  Description of Artificial Sequence:  Enzymatic Nucleic Acid
aaacagcgggctagctacaacgagctgcttc

SEQ ID NO: 17045 - DNA, 31 bp, Artificial Sequence
  Description of Artificial Sequence:  Enzymatic Nucleic Acid
ataaacagggctagctacaacgagtgctgct

SEQ ID NO: 17046 - DNA, 31 bp, Artificial Sequence
  Description of Artificial Sequence:  Enzymatic Nucleic Acid
tcaataaaggctagctacaacgaagcgtgct

SEQ ID NO: 17047 - DNA, 31 bp, Artificial Sequence
  Description of Artificial Sequence:  Enzymatic Nucleic Acid
tctttcaaggctagctacaacgaaaacagcg

SEQ ID NO: 17048 - DNA, 31 bp, Artificial Sequence
  Description of Artificial Sequence:  Enzymatic Nucleic Acid
ttctgtgaggctagctacaacgatctttcaa

SEQ ID NO: 17049 - DNA, 31 bp, Artificial Sequence
  Description of Artificial Sequence:  Enzymatic Nucleic Acid
ctcttctgggctagctacaacgagactcttt

SEQ ID NO: 17050 - DNA, 31 bp, Artificial Sequence
  Description of Artificial Sequence:  Enzymatic Nucleic Acid
caccttcaggctagctacaacgacctcttct

SEQ ID NO: 17051 - DNA, 31 bp, Artificial Sequence
  Description of Artificial Sequence:  Enzymatic Nucleic Acid
gatagacaggctagctacaacgacttcatcc

SEQ ID NO: 17052 - DNA, 31 bp, Artificial Sequence
  Description of Artificial Sequence:  Enzymatic Nucleic Acid
gtgatagaggctagctacaacgaaccttcat

SEQ ID NO: 17053 - DNA, 31 bp, Artificial Sequence
  Description of Artificial Sequence:  Enzymatic Nucleic Acid
tgcagtgaggctagctacaacgaagacacct

SEQ ID NO: 17054 - DNA, 31 bp, Artificial Sequence
  Description of Artificial Sequence:  Enzymatic Nucleic Acid
ctttgcagggctagctacaacgagatagaca

SEQ ID NO: 17055 - DNA, 31 bp, Artificial Sequence
  Description of Artificial Sequence:  Enzymatic Nucleic Acid
tggctttgggctagctacaacgaagtgatag

SEQ ID NO: 17056 - DNA, 31 bp, Artificial Sequence
  Description of Artificial Sequence:  Enzymatic Nucleic Acid
gttggtggggctagctacaacgatttgcagt

SEQ ID NO: 17057 - DNA, 31 bp, Artificial Sequence
  Description of Artificial Sequence:  Enzymatic Nucleic Acid
ctggttggggctagctacaacgaggctttgc

SEQ ID NO: 17058 - DNA, 31 bp, Artificial Sequence
  Description of Artificial Sequence:  Enzymatic Nucleic Acid
ccttctggggctagctacaacgatggtggct

SEQ ID NO: 17059 - DNA, 31 bp, Artificial Sequence
  Description of Artificial Sequence:  Enzymatic Nucleic Acid
ccacagagggctagctacaacgaccttctgg

SEQ ID NO: 17060 - DNA, 31 bp, Artificial Sequence
  Description of Artificial Sequence:  Enzymatic Nucleic Acid
actttccaggctagctacaacgaagagccct

SEQ ID NO: 17061 - DNA, 31 bp, Artificial Sequence
  Description of Artificial Sequence:  Enzymatic Nucleic Acid
atgctgaaggctagctacaacgatttccaca

SEQ ID NO: 17062 - DNA, 31 bp, Artificial Sequence
  Description of Artificial Sequence:  Enzymatic Nucleic Acid
gaggtatgggctagctacaacgatgaacttt

SEQ ID NO: 17063 - DNA, 31 bp, Artificial Sequence
  Description of Artificial Sequence:  Enzymatic Nucleic Acid
gtgaggtaggctagctacaacgagctgaact

SEQ ID NO: 17064 - DNA, 31 bp, Artificial Sequence
  Description of Artificial Sequence:  Enzymatic Nucleic Acid
cagtgaggggctagctacaacgaatgctgaa

SEQ ID NO: 17065 - DNA, 31 bp, Artificial Sequence
  Description of Artificial Sequence:  Enzymatic Nucleic Acid
ttgaacagggctagctacaacgagaggtatg

SEQ ID NO: 17066 - DNA, 31 bp, Artificial Sequence
  Description of Artificial Sequence:  Enzymatic Nucleic Acid
tccttgaaggctagctacaacgaagtgaggt

SEQ ID NO: 17067 - DNA, 31 bp, Artificial Sequence
  Description of Artificial Sequence:  Enzymatic Nucleic Acid
gtccgaggggctagctacaacgatccttgaa

SEQ ID NO: 17068 - DNA, 31 bp, Artificial Sequence
  Description of Artificial Sequence:  Enzymatic Nucleic Acid
tagacttgggctagctacaacgaccgaggtt

SEQ ID NO: 17069 - DNA, 31 bp, Artificial Sequence
  Description of Artificial Sequence:  Enzymatic Nucleic Acid
agattagaggctagctacaacgattgtccga

SEQ ID NO: 17070 - DNA, 31 bp, Artificial Sequence
  Description of Artificial Sequence:  Enzymatic Nucleic Acid
gctccagaggctagctacaacgatagacttg

SEQ ID NO: 17071 - DNA, 31 bp, Artificial Sequence
  Description of Artificial Sequence:  Enzymatic Nucleic Acid
gtgatcagggctagctacaacgatccagatt

SEQ ID NO: 17072 - DNA, 31 bp, Artificial Sequence
  Description of Artificial Sequence:  Enzymatic Nucleic Acid
tagagtgaggctagctacaacgacagctcca

SEQ ID NO: 17073 - DNA, 31 bp, Artificial Sequence
  Description of Artificial Sequence:  Enzymatic Nucleic Acid
tgttagagggctagctacaacgagatcagct

SEQ ID NO: 17074 - DNA, 31 bp, Artificial Sequence
  Description of Artificial Sequence:  Enzymatic Nucleic Acid
ggtgcatgggctagctacaacgatagagtga

SEQ ID NO: 17075 - DNA, 31 bp, Artificial Sequence
  Description of Artificial Sequence:  Enzymatic Nucleic Acid
caggtgcaggctagctacaacgagttagagt

SEQ ID NO: 17076 - DNA, 31 bp, Artificial Sequence
  Description of Artificial Sequence:  Enzymatic Nucleic Acid
cacaggtgggctagctacaacgaatgttaga

SEQ ID NO: 17077 - DNA, 31 bp, Artificial Sequence
  Description of Artificial Sequence:  Enzymatic Nucleic Acid
cacacaggggctagctacaacgagcatgtta

SEQ ID NO: 17078 - DNA, 31 bp, Artificial Sequence
  Description of Artificial Sequence:  Enzymatic Nucleic Acid
cagccacaggctagctacaacgaaggtgcat

SEQ ID NO: 17079 - DNA, 31 bp, Artificial Sequence
  Description of Artificial Sequence:  Enzymatic Nucleic Acid
cgcagccaggctagctacaacgaacaggtgc

SEQ ID NO: 17080 - DNA, 31 bp, Artificial Sequence
  Description of Artificial Sequence:  Enzymatic Nucleic Acid
agtcgcagggctagctacaacgacacacagg

SEQ ID NO: 17081 - DNA, 31 bp, Artificial Sequence
  Description of Artificial Sequence:  Enzymatic Nucleic Acid
gagagtcgggctagctacaacgaagccacac

SEQ ID NO: 17082 - DNA, 31 bp, Artificial Sequence
  Description of Artificial Sequence:  Enzymatic Nucleic Acid
gaagagagggctagctacaacgacgcagcca

SEQ ID NO: 17083 - DNA, 31 bp, Artificial Sequence
  Description of Artificial Sequence:  Enzymatic Nucleic Acid
aataggagggctagctacaacgacagaagag

SEQ ID NO: 17084 - DNA, 31 bp, Artificial Sequence
  Description of Artificial Sequence:  Enzymatic Nucleic Acid
agggttaaggctagctacaacgaaggagcca

SEQ ID NO: 17085 - DNA, 31 bp, Artificial Sequence
  Description of Artificial Sequence:  Enzymatic Nucleic Acid
aaggagggggctagctacaacgataatagga

SEQ ID NO: 17086 - DNA, 31 bp, Artificial Sequence
  Description of Artificial Sequence:  Enzymatic Nucleic Acid
ttttcggaggctagctacaacgaaaggaggg

SEQ ID NO: 17087 - DNA, 31 bp, Artificial Sequence
  Description of Artificial Sequence:  Enzymatic Nucleic Acid
ccttttcaggctagctacaacgattttcgga

SEQ ID NO: 17088 - DNA, 31 bp, Artificial Sequence
  Description of Artificial Sequence:  Enzymatic Nucleic Acid
gaagaagaggctagctacaacgacttttcat

SEQ ID NO: 17089 - DNA, 31 bp, Artificial Sequence
  Description of Artificial Sequence:  Enzymatic Nucleic Acid
agtctttaggctagctacaacgattcagaag

SEQ ID NO: 17090 - DNA, 31 bp, Artificial Sequence
  Description of Artificial Sequence:  Enzymatic Nucleic Acid
gtagtcagggctagctacaacgactttattt

SEQ ID NO: 17091 - DNA, 31 bp, Artificial Sequence
  Description of Artificial Sequence:  Enzymatic Nucleic Acid
ataggtagggctagctacaacgacagtcttt

SEQ ID NO: 17092 - DNA, 31 bp, Artificial Sequence
  Description of Artificial Sequence:  Enzymatic Nucleic Acid
ttgataggggctagctacaacgaagtcagtc

SEQ ID NO: 17093 - DNA, 31 bp, Artificial Sequence
  Description of Artificial Sequence:  Enzymatic Nucleic Acid
ataattgaggctagctacaacgaaggtagtc

SEQ ID NO: 17094 - DNA, 31 bp, Artificial Sequence
  Description of Artificial Sequence:  Enzymatic Nucleic Acid
cattataaggctagctacaacgatgataggt

SEQ ID NO: 17095 - DNA, 31 bp, Artificial Sequence
  Description of Artificial Sequence:  Enzymatic Nucleic Acid
gtccattaggctagctacaacgaaattgata

SEQ ID NO: 17096 - DNA, 31 bp, Artificial Sequence
  Description of Artificial Sequence:  Enzymatic Nucleic Acid
tgggtccaggctagctacaacgatataattg

SEQ ID NO: 17097 - DNA, 31 bp, Artificial Sequence
  Description of Artificial Sequence:  Enzymatic Nucleic Acid
catctgggggctagctacaacgaccattata

SEQ ID NO: 17098 - DNA, 31 bp, Artificial Sequence
  Description of Artificial Sequence:  Enzymatic Nucleic Acid
gaacttcaggctagctacaacgactgggtcc

SEQ ID NO: 17099 - DNA, 31 bp, Artificial Sequence
  Description of Artificial Sequence:  Enzymatic Nucleic Acid
caaaggaaggctagctacaacgattcatctg

SEQ ID NO: 17100 - DNA, 31 bp, Artificial Sequence
  Description of Artificial Sequence:  Enzymatic Nucleic Acid
actgctcaggctagctacaacgaccaaagga

SEQ ID NO: 17101 - DNA, 31 bp, Artificial Sequence
  Description of Artificial Sequence:  Enzymatic Nucleic Acid
tcacactgggctagctacaacgatcatccaa

SEQ ID NO: 17102 - DNA, 31 bp, Artificial Sequence
  Description of Artificial Sequence:  Enzymatic Nucleic Acid
cgctcacaggctagctacaacgatgctcatc

SEQ ID NO: 17103 - DNA, 31 bp, Artificial Sequence
  Description of Artificial Sequence:  Enzymatic Nucleic Acid
gccgctcaggctagctacaacgaactgctca

SEQ ID NO: 17104 - DNA, 31 bp, Artificial Sequence
  Description of Artificial Sequence:  Enzymatic Nucleic Acid
gggagccgggctagctacaacgatcacactg

SEQ ID NO: 17105 - DNA, 31 bp, Artificial Sequence
  Description of Artificial Sequence:  Enzymatic Nucleic Acid
taagggagggctagctacaacgacgctcaca

SEQ ID NO: 17106 - DNA, 31 bp, Artificial Sequence
  Description of Artificial Sequence:  Enzymatic Nucleic Acid
tggcatcaggctagctacaacgaaagggagc

SEQ ID NO: 17107 - DNA, 31 bp, Artificial Sequence
  Description of Artificial Sequence:  Enzymatic Nucleic Acid
tgctggcaggctagctacaacgacataaggg

SEQ ID NO: 17108 - DNA, 31 bp, Artificial Sequence
  Description of Artificial Sequence:  Enzymatic Nucleic Acid
cttgctggggctagctacaacgaatcataag

SEQ ID NO: 17109 - DNA, 31 bp, Artificial Sequence
  Description of Artificial Sequence:  Enzymatic Nucleic Acid
cccacttgggctagctacaacgatggcatca

SEQ ID NO: 17110 - DNA, 31 bp, Artificial Sequence
  Description of Artificial Sequence:  Enzymatic Nucleic Acid
aactcccaggctagctacaacgattgctggc

SEQ ID NO: 17111 - DNA, 31 bp, Artificial Sequence
  Description of Artificial Sequence:  Enzymatic Nucleic Acid
cgggcaaaggctagctacaacgatcccactt

SEQ ID NO: 17112 - DNA, 31 bp, Artificial Sequence
  Description of Artificial Sequence:  Enzymatic Nucleic Acid
ctcccgggggctagctacaacgaaaactccc

SEQ ID NO: 17113 - DNA, 31 bp, Artificial Sequence
  Description of Artificial Sequence:  Enzymatic Nucleic Acid
agtttaagggctagctacaacgactctcccg

SEQ ID NO: 17114 - DNA, 31 bp, Artificial Sequence
  Description of Artificial Sequence:  Enzymatic Nucleic Acid
ttgcccagggctagctacaacgattaagtct

SEQ ID NO: 17115 - DNA, 31 bp, Artificial Sequence
  Description of Artificial Sequence:  Enzymatic Nucleic Acid
gtgatttgggctagctacaacgaccagttta

SEQ ID NO: 17116 - DNA, 31 bp, Artificial Sequence
  Description of Artificial Sequence:  Enzymatic Nucleic Acid
ccaagtgaggctagctacaacgattgcccag

SEQ ID NO: 17117 - DNA, 31 bp, Artificial Sequence
  Description of Artificial Sequence:  Enzymatic Nucleic Acid
cttccaagggctagctacaacgagatttgcc

SEQ ID NO: 17118 - DNA, 31 bp, Artificial Sequence
  Description of Artificial Sequence:  Enzymatic Nucleic Acid
tccaaaagggctagctacaacgaccctcttc

SEQ ID NO: 17119 - DNA, 31 bp, Artificial Sequence
  Description of Artificial Sequence:  Enzymatic Nucleic Acid
ttgaaccaggctagctacaacgattttccaa

SEQ ID NO: 17120 - DNA, 31 bp, Artificial Sequence
  Description of Artificial Sequence:  Enzymatic Nucleic Acid
tgcttgaaggctagctacaacgacacttttc

SEQ ID NO: 17121 - DNA, 31 bp, Artificial Sequence
  Description of Artificial Sequence:  Enzymatic Nucleic Acid
tgctgatgggctagctacaacgattgaacca

SEQ ID NO: 17122 - DNA, 31 bp, Artificial Sequence
  Description of Artificial Sequence:  Enzymatic Nucleic Acid
aatgctgaggctagctacaacgagcttgaac

SEQ ID NO: 17123 - DNA, 31 bp, Artificial Sequence
  Description of Artificial Sequence:  Enzymatic Nucleic Acid
gccaaatgggctagctacaacgatgatgctt

SEQ ID NO: 17124 - DNA, 31 bp, Artificial Sequence
  Description of Artificial Sequence:  Enzymatic Nucleic Acid
atgccaaaggctagctacaacgagctgatgc

SEQ ID NO: 17125 - DNA, 31 bp, Artificial Sequence
  Description of Artificial Sequence:  Enzymatic Nucleic Acid
tcttaatgggctagctacaacgacaaatgct

SEQ ID NO: 17126 - DNA, 31 bp, Artificial Sequence
  Description of Artificial Sequence:  Enzymatic Nucleic Acid
tttcttaaggctagctacaacgagccaaatg

SEQ ID NO: 17127 - DNA, 31 bp, Artificial Sequence
  Description of Artificial Sequence:  Enzymatic Nucleic Acid
gtaggtgaggctagctacaacgattcttaat

SEQ ID NO: 17128 - DNA, 31 bp, Artificial Sequence
  Description of Artificial Sequence:  Enzymatic Nucleic Acid
cacgtaggggctagctacaacgagatttctt

SEQ ID NO: 17129 - DNA, 31 bp, Artificial Sequence
  Description of Artificial Sequence:  Enzymatic Nucleic Acid
ccggcacgggctagctacaacgaaggtgatt

SEQ ID NO: 17130 - DNA, 31 bp, Artificial Sequence
  Description of Artificial Sequence:  Enzymatic Nucleic Acid
gtccggcaggctagctacaacgagtaggtga

SEQ ID NO: 17131 - DNA, 31 bp, Artificial Sequence
  Description of Artificial Sequence:  Enzymatic Nucleic Acid
cagtccggggctagctacaacgaacgtaggt

SEQ ID NO: 17132 - DNA, 31 bp, Artificial Sequence
  Description of Artificial Sequence:  Enzymatic Nucleic Acid
agccacagggctagctacaacgaccggcacg

SEQ ID NO: 17133 - DNA, 31 bp, Artificial Sequence
  Description of Artificial Sequence:  Enzymatic Nucleic Acid
cacagccaggctagctacaacgaagtccggc

SEQ ID NO: 17134 - DNA, 31 bp, Artificial Sequence
  Description of Artificial Sequence:  Enzymatic Nucleic Acid
tttcacagggctagctacaacgacacagtcc

SEQ ID NO: 17135 - DNA, 31 bp, Artificial Sequence
  Description of Artificial Sequence:  Enzymatic Nucleic Acid
cattttcaggctagctacaacgaagccacag

SEQ ID NO: 17136 - DNA, 31 bp, Artificial Sequence
  Description of Artificial Sequence:  Enzymatic Nucleic Acid
tttcagcaggctagctacaacgatttcacag

SEQ ID NO: 17137 - DNA, 31 bp, Artificial Sequence
  Description of Artificial Sequence:  Enzymatic Nucleic Acid
tctttcagggctagctacaacgaattttcac

SEQ ID NO: 17138 - DNA, 31 bp, Artificial Sequence
  Description of Artificial Sequence:  Enzymatic Nucleic Acid
ggccgtggggctagctacaacgacccctctt

SEQ ID NO: 17139 - DNA, 31 bp, Artificial Sequence
  Description of Artificial Sequence:  Enzymatic Nucleic Acid
gctggccgggctagctacaacgaggccccct

SEQ ID NO: 17140 - DNA, 31 bp, Artificial Sequence
  Description of Artificial Sequence:  Enzymatic Nucleic Acid
ctcgctggggctagctacaacgacgtggccc

SEQ ID NO: 17141 - DNA, 31 bp, Artificial Sequence
  Description of Artificial Sequence:  Enzymatic Nucleic Acid
tgtactcgggctagctacaacgatggccgtg

SEQ ID NO: 17142 - DNA, 31 bp, Artificial Sequence
  Description of Artificial Sequence:  Enzymatic Nucleic Acid
gctttgtaggctagctacaacgatcgctggc

SEQ ID NO: 17143 - DNA, 31 bp, Artificial Sequence
  Description of Artificial Sequence:  Enzymatic Nucleic Acid
gagctttgggctagctacaacgaactcgctg

SEQ ID NO: 17144 - DNA, 31 bp, Artificial Sequence
  Description of Artificial Sequence:  Enzymatic Nucleic Acid
catcagagggctagctacaacgatttgtact

SEQ ID NO: 17145 - DNA, 31 bp, Artificial Sequence
  Description of Artificial Sequence:  Enzymatic Nucleic Acid
ctcagtcaggctagctacaacgacagagctt

SEQ ID NO: 17146 - DNA, 31 bp, Artificial Sequence
  Description of Artificial Sequence:  Enzymatic Nucleic Acid
tagctcagggctagctacaacgacatcagag

SEQ ID NO: 17147 - DNA, 31 bp, Artificial Sequence
  Description of Artificial Sequence:  Enzymatic Nucleic Acid
atttttagggctagctacaacgatcagtcat

SEQ ID NO: 17148 - DNA, 31 bp, Artificial Sequence
  Description of Artificial Sequence:  Enzymatic Nucleic Acid
ggtcaagaggctagctacaacgattttagct

SEQ ID NO: 17149 - DNA, 31 bp, Artificial Sequence
  Description of Artificial Sequence:  Enzymatic Nucleic Acid
aatgtgggggctagctacaacgacaagattt

SEQ ID NO: 17150 - DNA, 31 bp, Artificial Sequence
  Description of Artificial Sequence:  Enzymatic Nucleic Acid
ggccaatgggctagctacaacgagggtcaag

SEQ ID NO: 17151 - DNA, 31 bp, Artificial Sequence
  Description of Artificial Sequence:  Enzymatic Nucleic Acid
gtggccaaggctagctacaacgagtgggtca

SEQ ID NO: 17152 - DNA, 31 bp, Artificial Sequence
  Description of Artificial Sequence:  Enzymatic Nucleic Acid
gatggtggggctagctacaacgacaatgtgg

SEQ ID NO: 17153 - DNA, 31 bp, Artificial Sequence
  Description of Artificial Sequence:  Enzymatic Nucleic Acid
tcagatggggctagctacaacgaggccaatg

SEQ ID NO: 17154 - DNA, 31 bp, Artificial Sequence
  Description of Artificial Sequence:  Enzymatic Nucleic Acid
cgttcagaggctagctacaacgaggtggcca

SEQ ID NO: 17155 - DNA, 31 bp, Artificial Sequence
  Description of Artificial Sequence:  Enzymatic Nucleic Acid
taaccacgggctagctacaacgatcagatgg

SEQ ID NO: 17156 - DNA, 31 bp, Artificial Sequence
  Description of Artificial Sequence:  Enzymatic Nucleic Acid
gttaaccaggctagctacaacgagttcagat

SEQ ID NO: 17157 - DNA, 31 bp, Artificial Sequence
  Description of Artificial Sequence:  Enzymatic Nucleic Acid
caggttaaggctagctacaacgacacgttca

SEQ ID NO: 17158 - DNA, 31 bp, Artificial Sequence
  Description of Artificial Sequence:  Enzymatic Nucleic Acid
ccagcaggggctagctacaacgataaccacg

SEQ ID NO: 17159 - DNA, 31 bp, Artificial Sequence
  Description of Artificial Sequence:  Enzymatic Nucleic Acid
gctcccagggctagctacaacgaaggttaac

SEQ ID NO: 17160 - DNA, 31 bp, Artificial Sequence
  Description of Artificial Sequence:  Enzymatic Nucleic Acid
ggtgcaggggctagctacaacgatcccagca

SEQ ID NO: 17161 - DNA, 31 bp, Artificial Sequence
  Description of Artificial Sequence:  Enzymatic Nucleic Acid
gcttggtgggctagctacaacgaaggctccc

SEQ ID NO: 17162 - DNA, 31 bp, Artificial Sequence
  Description of Artificial Sequence:  Enzymatic Nucleic Acid
ttgcttggggctagctacaacgagcaggctc

SEQ ID NO: 17163 - DNA, 31 bp, Artificial Sequence
  Description of Artificial Sequence:  Enzymatic Nucleic Acid
cctccttgggctagctacaacgattggtgca

SEQ ID NO: 17164 - DNA, 31 bp, Artificial Sequence
  Description of Artificial Sequence:  Enzymatic Nucleic Acid
atcagaggggctagctacaacgacctccttg

SEQ ID NO: 17165 - DNA, 31 bp, Artificial Sequence
  Description of Artificial Sequence:  Enzymatic Nucleic Acid
aatcaccaggctagctacaacgacagaggcc

SEQ ID NO: 17166 - DNA, 31 bp, Artificial Sequence
  Description of Artificial Sequence:  Enzymatic Nucleic Acid
aacaatcaggctagctacaacgacatcagag

SEQ ID NO: 17167 - DNA, 31 bp, Artificial Sequence
  Description of Artificial Sequence:  Enzymatic Nucleic Acid
ttcaacaaggctagctacaacgacaccatca

SEQ ID NO: 17168 - DNA, 31 bp, Artificial Sequence
  Description of Artificial Sequence:  Enzymatic Nucleic Acid
gtattcaaggctagctacaacgaaatcacca

SEQ ID NO: 17169 - DNA, 31 bp, Artificial Sequence
  Description of Artificial Sequence:  Enzymatic Nucleic Acid
ttgcagtaggctagctacaacgatcaacaat

SEQ ID NO: 17170 - DNA, 31 bp, Artificial Sequence
  Description of Artificial Sequence:  Enzymatic Nucleic Acid
atttgcagggctagctacaacgaattcaaca

SEQ ID NO: 17171 - DNA, 31 bp, Artificial Sequence
  Description of Artificial Sequence:  Enzymatic Nucleic Acid
catatttgggctagctacaacgaagtattca

SEQ ID NO: 17172 - DNA, 31 bp, Artificial Sequence
  Description of Artificial Sequence:  Enzymatic Nucleic Acid
tttccataggctagctacaacgattgcagta

SEQ ID NO: 17173 - DNA, 31 bp, Artificial Sequence
  Description of Artificial Sequence:  Enzymatic Nucleic Acid
gatttccaggctagctacaacgaatttgcag

SEQ ID NO: 17174 - DNA, 31 bp, Artificial Sequence
  Description of Artificial Sequence:  Enzymatic Nucleic Acid
tggagagaggctagctacaacgattccatat

SEQ ID NO: 17175 - DNA, 31 bp, Artificial Sequence
  Description of Artificial Sequence:  Enzymatic Nucleic Acid
tgaggtagggctagctacaacgatggagaga

SEQ ID NO: 17176 - DNA, 31 bp, Artificial Sequence
  Description of Artificial Sequence:  Enzymatic Nucleic Acid
tcttgaggggctagctacaacgaagttggag

SEQ ID NO: 17177 - DNA, 31 bp, Artificial Sequence
  Description of Artificial Sequence:  Enzymatic Nucleic Acid
cacgtttgggctagctacaacgatcttgagg

SEQ ID NO: 17178 - DNA, 31 bp, Artificial Sequence
  Description of Artificial Sequence:  Enzymatic Nucleic Acid
aagtcacgggctagctacaacgattgctctt

SEQ ID NO: 17179 - DNA, 31 bp, Artificial Sequence
  Description of Artificial Sequence:  Enzymatic Nucleic Acid
ataagtcaggctagctacaacgagtttgctc

SEQ ID NO: 17180 - DNA, 31 bp, Artificial Sequence
  Description of Artificial Sequence:  Enzymatic Nucleic Acid
aaaataagggctagctacaacgacacgtttg

SEQ ID NO: 17181 - DNA, 31 bp, Artificial Sequence
  Description of Artificial Sequence:  Enzymatic Nucleic Acid
agaaaaaaggctagctacaacgaaagtcacg

SEQ ID NO: 17182 - DNA, 31 bp, Artificial Sequence
  Description of Artificial Sequence:  Enzymatic Nucleic Acid
catccttgggctagctacaacgatgagaaaa

SEQ ID NO: 17183 - DNA, 31 bp, Artificial Sequence
  Description of Artificial Sequence:  Enzymatic Nucleic Acid
gtgctgcaggctagctacaacgaccttgttg

SEQ ID NO: 17184 - DNA, 31 bp, Artificial Sequence
  Description of Artificial Sequence:  Enzymatic Nucleic Acid
tagtgctgggctagctacaacgaatccttgt

SEQ ID NO: 17185 - DNA, 31 bp, Artificial Sequence
  Description of Artificial Sequence:  Enzymatic Nucleic Acid
gtgtagtgggctagctacaacgatgcatcct

SEQ ID NO: 17186 - DNA, 31 bp, Artificial Sequence
  Description of Artificial Sequence:  Enzymatic Nucleic Acid
atgtgtagggctagctacaacgagctgcatc

SEQ ID NO: 17187 - DNA, 31 bp, Artificial Sequence
  Description of Artificial Sequence:  Enzymatic Nucleic Acid
tccatgtgggctagctacaacgaagtgctgc

SEQ ID NO: 17188 - DNA, 31 bp, Artificial Sequence
  Description of Artificial Sequence:  Enzymatic Nucleic Acid
gctccatgggctagctacaacgagtagtgct

SEQ ID NO: 17189 - DNA, 31 bp, Artificial Sequence
  Description of Artificial Sequence:  Enzymatic Nucleic Acid
aggctccaggctagctacaacgagtgtagtg

SEQ ID NO: 17190 - DNA, 31 bp, Artificial Sequence
  Description of Artificial Sequence:  Enzymatic Nucleic Acid
ttcttaggggctagctacaacgatccatgtg

SEQ ID NO: 17191 - DNA, 31 bp, Artificial Sequence
  Description of Artificial Sequence:  Enzymatic Nucleic Acid
tggctccaggctagctacaacgatttttctt

SEQ ID NO: 17192 - DNA, 31 bp, Artificial Sequence
  Description of Artificial Sequence:  Enzymatic Nucleic Acid
aggcctggggctagctacaacgatccatttt

SEQ ID NO: 17193 - DNA, 31 bp, Artificial Sequence
  Description of Artificial Sequence:  Enzymatic Nucleic Acid
gttccaggggctagctacaacgactggctcc

SEQ ID NO: 17194 - DNA, 31 bp, Artificial Sequence
  Description of Artificial Sequence:  Enzymatic Nucleic Acid
ttgccttgggctagctacaacgatccaggcc

SEQ ID NO: 17195 - DNA, 31 bp, Artificial Sequence
  Description of Artificial Sequence:  Enzymatic Nucleic Acid
gtttcttgggctagctacaacgacttgttcc

SEQ ID NO: 17196 - DNA, 31 bp, Artificial Sequence
  Description of Artificial Sequence:  Enzymatic Nucleic Acid
agtcttggggctagctacaacgattcttgcc

SEQ ID NO: 17197 - DNA, 31 bp, Artificial Sequence
  Description of Artificial Sequence:  Enzymatic Nucleic Acid
ctatctagggctagctacaacgacttggttt

SEQ ID NO: 17198 - DNA, 31 bp, Artificial Sequence
  Description of Artificial Sequence:  Enzymatic Nucleic Acid
tgacgctaggctagctacaacgactagtctt

SEQ ID NO: 17199 - DNA, 31 bp, Artificial Sequence
  Description of Artificial Sequence:  Enzymatic Nucleic Acid
tggtgacgggctagctacaacgatatctagt

SEQ ID NO: 17200 - DNA, 31 bp, Artificial Sequence
  Description of Artificial Sequence:  Enzymatic Nucleic Acid
gctggtgaggctagctacaacgagctatcta

SEQ ID NO: 17201 - DNA, 31 bp, Artificial Sequence
  Description of Artificial Sequence:  Enzymatic Nucleic Acid
gctgctggggctagctacaacgagacgctat

SEQ ID NO: 17202 - DNA, 31 bp, Artificial Sequence
  Description of Artificial Sequence:  Enzymatic Nucleic Acid
tttcgctgggctagctacaacgatggtgacg

SEQ ID NO: 17203 - DNA, 31 bp, Artificial Sequence
  Description of Artificial Sequence:  Enzymatic Nucleic Acid
agctttcgggctagctacaacgatgctggtg

SEQ ID NO: 17204 - DNA, 31 bp, Artificial Sequence
  Description of Artificial Sequence:  Enzymatic Nucleic Acid
tcgcaaagggctagctacaacgatttcgctg

SEQ ID NO: 17205 - DNA, 31 bp, Artificial Sequence
  Description of Artificial Sequence:  Enzymatic Nucleic Acid
ggagctcgggctagctacaacgaaaagcttt

SEQ ID NO: 17206 - DNA, 31 bp, Artificial Sequence
  Description of Artificial Sequence:  Enzymatic Nucleic Acid
agccggagggctagctacaacgatcgcaaag

SEQ ID NO: 17207 - DNA, 31 bp, Artificial Sequence
  Description of Artificial Sequence:  Enzymatic Nucleic Acid
cctgaaagggctagctacaacgacggagctc

SEQ ID NO: 17208 - DNA, 31 bp, Artificial Sequence
  Description of Artificial Sequence:  Enzymatic Nucleic Acid
gacttttaggctagctacaacgacttcctga

SEQ ID NO: 17209 - DNA, 31 bp, Artificial Sequence
  Description of Artificial Sequence:  Enzymatic Nucleic Acid
cactcagaggctagctacaacgattttatct

SEQ ID NO: 17210 - DNA, 31 bp, Artificial Sequence
  Description of Artificial Sequence:  Enzymatic Nucleic Acid
caacatcaggctagctacaacgatcagactt

SEQ ID NO: 17211 - DNA, 31 bp, Artificial Sequence
  Description of Artificial Sequence:  Enzymatic Nucleic Acid
cctcaacaggctagctacaacgacactcaga

SEQ ID NO: 17212 - DNA, 31 bp, Artificial Sequence
  Description of Artificial Sequence:  Enzymatic Nucleic Acid
ttcctcaaggctagctacaacgaatcactca

SEQ ID NO: 17213 - DNA, 31 bp, Artificial Sequence
  Description of Artificial Sequence:  Enzymatic Nucleic Acid
cgtcagaaggctagctacaacgacctcctct

SEQ ID NO: 17214 - DNA, 31 bp, Artificial Sequence
  Description of Artificial Sequence:  Enzymatic Nucleic Acid
agaaaccgggctagctacaacgacagaatcc

SEQ ID NO: 17215 - DNA, 31 bp, Artificial Sequence
  Description of Artificial Sequence:  Enzymatic Nucleic Acid
tgtagaaaggctagctacaacgacgtcagaa

SEQ ID NO: 17216 - DNA, 31 bp, Artificial Sequence
  Description of Artificial Sequence:  Enzymatic Nucleic Acid
gctccttgggctagctacaacgaagaaaccg

SEQ ID NO: 17217 - DNA, 31 bp, Artificial Sequence
  Description of Artificial Sequence:  Enzymatic Nucleic Acid
gtgatgggggctagctacaacgatccttgta

SEQ ID NO: 17218 - DNA, 31 bp, Artificial Sequence
  Description of Artificial Sequence:  Enzymatic Nucleic Acid
catagtgaggctagctacaacgagggctcct

SEQ ID NO: 17219 - DNA, 31 bp, Artificial Sequence
  Description of Artificial Sequence:  Enzymatic Nucleic Acid
ttccatagggctagctacaacgagatgggct

SEQ ID NO: 17220 - DNA, 31 bp, Artificial Sequence
  Description of Artificial Sequence:  Enzymatic Nucleic Acid
atcttccaggctagctacaacgaagtgatgg

SEQ ID NO: 17221 - DNA, 31 bp, Artificial Sequence
  Description of Artificial Sequence:  Enzymatic Nucleic Acid
aaatcagaggctagctacaacgacttccata

SEQ ID NO: 17222 - DNA, 31 bp, Artificial Sequence
  Description of Artificial Sequence:  Enzymatic Nucleic Acid
gtaagaaaggctagctacaacgacagatctt

SEQ ID NO: 17223 - DNA, 31 bp, Artificial Sequence
  Description of Artificial Sequence:  Enzymatic Nucleic Acid
gaaaactgggctagctacaacgaaagaaatc

SEQ ID NO: 17224 - DNA, 31 bp, Artificial Sequence
  Description of Artificial Sequence:  Enzymatic Nucleic Acid
cttgaaaaggctagctacaacgatgtaagaa

SEQ ID NO: 17225 - DNA, 31 bp, Artificial Sequence
  Description of Artificial Sequence:  Enzymatic Nucleic Acid
tctggccaggctagctacaacgattgaaaac

SEQ ID NO: 17226 - DNA, 31 bp, Artificial Sequence
  Description of Artificial Sequence:  Enzymatic Nucleic Acid
gcctctggggctagctacaacgacacttgaa

SEQ ID NO: 17227 - DNA, 31 bp, Artificial Sequence
  Description of Artificial Sequence:  Enzymatic Nucleic Acid
actccatgggctagctacaacgactctggcc

SEQ ID NO: 17228 - DNA, 31 bp, Artificial Sequence
  Description of Artificial Sequence:  Enzymatic Nucleic Acid
gaactccaggctagctacaacgagcctctgg

SEQ ID NO: 17229 - DNA, 31 bp, Artificial Sequence
  Description of Artificial Sequence:  Enzymatic Nucleic Acid
gacaggaaggctagctacaacgatccatgcc

SEQ ID NO: 17230 - DNA, 31 bp, Artificial Sequence
  Description of Artificial Sequence:  Enzymatic Nucleic Acid
ctggaagaggctagctacaacgaaggaactc

SEQ ID NO: 17231 - DNA, 31 bp, Artificial Sequence
  Description of Artificial Sequence:  Enzymatic Nucleic Acid
tgaatgcaggctagctacaacgatttctgga

SEQ ID NO: 17232 - DNA, 31 bp, Artificial Sequence
  Description of Artificial Sequence:  Enzymatic Nucleic Acid
gatgaatgggctagctacaacgaactttctg

SEQ ID NO: 17233 - DNA, 31 bp, Artificial Sequence
  Description of Artificial Sequence:  Enzymatic Nucleic Acid
ccgatgaaggctagctacaacgagcactttc

SEQ ID NO: 17234 - DNA, 31 bp, Artificial Sequence
  Description of Artificial Sequence:  Enzymatic Nucleic Acid
ggtcccgaggctagctacaacgagaatgcac

SEQ ID NO: 17235 - DNA, 31 bp, Artificial Sequence
  Description of Artificial Sequence:  Enzymatic Nucleic Acid
ctgccaggggctagctacaacgacccgatga

SEQ ID NO: 17236 - DNA, 31 bp, Artificial Sequence
  Description of Artificial Sequence:  Enzymatic Nucleic Acid
tctcgctgggctagctacaacgacaggtccc

SEQ ID NO: 17237 - DNA, 31 bp, Artificial Sequence
  Description of Artificial Sequence:  Enzymatic Nucleic Acid
gtttctcgggctagctacaacgatgccaggt

SEQ ID NO: 17238 - DNA, 31 bp, Artificial Sequence
  Description of Artificial Sequence:  Enzymatic Nucleic Acid
aaagaatgggctagctacaacgattctcgct

SEQ ID NO: 17239 - DNA, 31 bp, Artificial Sequence
  Description of Artificial Sequence:  Enzymatic Nucleic Acid
taaaagaaggctagctacaacgagtttctcg

SEQ ID NO: 17240 - DNA, 31 bp, Artificial Sequence
  Description of Artificial Sequence:  Enzymatic Nucleic Acid
ttctcagaggctagctacaacgaaaaagaat

SEQ ID NO: 17241 - DNA, 31 bp, Artificial Sequence
  Description of Artificial Sequence:  Enzymatic Nucleic Acid
ccacgttgggctagctacaacgatctcagat

SEQ ID NO: 17242 - DNA, 31 bp, Artificial Sequence
  Description of Artificial Sequence:  Enzymatic Nucleic Acid
tcaccacgggctagctacaacgatgttctca

SEQ ID NO: 17243 - DNA, 31 bp, Artificial Sequence
  Description of Artificial Sequence:  Enzymatic Nucleic Acid
cttcaccaggctagctacaacgagttgttct

SEQ ID NO: 17244 - DNA, 31 bp, Artificial Sequence
  Description of Artificial Sequence:  Enzymatic Nucleic Acid
aatcttcaggctagctacaacgacacgttgt

SEQ ID NO: 17245 - DNA, 31 bp, Artificial Sequence
  Description of Artificial Sequence:  Enzymatic Nucleic Acid
atcacaaaggctagctacaacgacttcacca

SEQ ID NO: 17246 - DNA, 31 bp, Artificial Sequence
  Description of Artificial Sequence:  Enzymatic Nucleic Acid
caaaatcaggctagctacaacgaaaatcttc

SEQ ID NO: 17247 - DNA, 31 bp, Artificial Sequence
  Description of Artificial Sequence:  Enzymatic Nucleic Acid
ggccaaaaggctagctacaacgacacaaatc

SEQ ID NO: 17248 - DNA, 31 bp, Artificial Sequence
  Description of Artificial Sequence:  Enzymatic Nucleic Acid
gggcaaggggctagctacaacgacaaaatca

SEQ ID NO: 17249 - DNA, 31 bp, Artificial Sequence
  Description of Artificial Sequence:  Enzymatic Nucleic Acid
atcccgggggctagctacaacgaaaggccaa

SEQ ID NO: 17250 - DNA, 31 bp, Artificial Sequence
  Description of Artificial Sequence:  Enzymatic Nucleic Acid
tataaataggctagctacaacgacccgggca

SEQ ID NO: 17251 - DNA, 31 bp, Artificial Sequence
  Description of Artificial Sequence:  Enzymatic Nucleic Acid
cttataaaggctagctacaacgaatcccggg

SEQ ID NO: 17252 - DNA, 31 bp, Artificial Sequence
  Description of Artificial Sequence:  Enzymatic Nucleic Acid
ggttcttaggctagctacaacgaaaatatcc

SEQ ID NO: 17253 - DNA, 31 bp, Artificial Sequence
  Description of Artificial Sequence:  Enzymatic Nucleic Acid
aatcggggggctagctacaacgatcttataa

SEQ ID NO: 17254 - DNA, 31 bp, Artificial Sequence
  Description of Artificial Sequence:  Enzymatic Nucleic Acid
tcacataaggctagctacaacgacggggttc

SEQ ID NO: 17255 - DNA, 31 bp, Artificial Sequence
  Description of Artificial Sequence:  Enzymatic Nucleic Acid
ttctcacaggctagctacaacgaaatcgggg

SEQ ID NO: 17256 - DNA, 31 bp, Artificial Sequence
  Description of Artificial Sequence:  Enzymatic Nucleic Acid
ttttctcaggctagctacaacgaataatcgg

SEQ ID NO: 17257 - DNA, 31 bp, Artificial Sequence
  Description of Artificial Sequence:  Enzymatic Nucleic Acid
gtcgagtaggctagctacaacgactcctttt

SEQ ID NO: 17258 - DNA, 31 bp, Artificial Sequence
  Description of Artificial Sequence:  Enzymatic Nucleic Acid
aagtcgagggctagctacaacgaatctcctt

SEQ ID NO: 17259 - DNA, 31 bp, Artificial Sequence
  Description of Artificial Sequence:  Enzymatic Nucleic Acid
agaggaagggctagctacaacgacgagtatc

SEQ ID NO: 17260 - DNA, 31 bp, Artificial Sequence
  Description of Artificial Sequence:  Enzymatic Nucleic Acid
gccatccaggctagctacaacgattcagagg

SEQ ID NO: 17261 - DNA, 31 bp, Artificial Sequence
  Description of Artificial Sequence:  Enzymatic Nucleic Acid
gggagccaggctagctacaacgaccatttca

SEQ ID NO: 17262 - DNA, 31 bp, Artificial Sequence
  Description of Artificial Sequence:  Enzymatic Nucleic Acid
ttcgggagggctagctacaacgacatccatt

SEQ ID NO: 17263 - DNA, 31 bp, Artificial Sequence
  Description of Artificial Sequence:  Enzymatic Nucleic Acid
aagatagaggctagctacaacgatcgggagc

SEQ ID NO: 17264 - DNA, 31 bp, Artificial Sequence
  Description of Artificial Sequence:  Enzymatic Nucleic Acid
gtcaaagaggctagctacaacgaagattcgg

SEQ ID NO: 17265 - DNA, 31 bp, Artificial Sequence
  Description of Artificial Sequence:  Enzymatic Nucleic Acid
agattttgggctagctacaacgacaaagata

SEQ ID NO: 17266 - DNA, 31 bp, Artificial Sequence
  Description of Artificial Sequence:  Enzymatic Nucleic Acid
gctgtagaggctagctacaacgatttgtcaa

SEQ ID NO: 17267 - DNA, 31 bp, Artificial Sequence
  Description of Artificial Sequence:  Enzymatic Nucleic Acid
tggtgctgggctagctacaacgaagattttg

SEQ ID NO: 17268 - DNA, 31 bp, Artificial Sequence
  Description of Artificial Sequence:  Enzymatic Nucleic Acid
tcttggtgggctagctacaacgatgtagatt

SEQ ID NO: 17269 - DNA, 31 bp, Artificial Sequence
  Description of Artificial Sequence:  Enzymatic Nucleic Acid
gctcttggggctagctacaacgagctgtaga

SEQ ID NO: 17270 - DNA, 31 bp, Artificial Sequence
  Description of Artificial Sequence:  Enzymatic Nucleic Acid
acacgtcgggctagctacaacgatcttggtg

SEQ ID NO: 17271 - DNA, 31 bp, Artificial Sequence
  Description of Artificial Sequence:  Enzymatic Nucleic Acid
accacacgggctagctacaacgacgctcttg

SEQ ID NO: 17272 - DNA, 31 bp, Artificial Sequence
  Description of Artificial Sequence:  Enzymatic Nucleic Acid
agaccacaggctagctacaacgagtcgctct

SEQ ID NO: 17273 - DNA, 31 bp, Artificial Sequence
  Description of Artificial Sequence:  Enzymatic Nucleic Acid
taagaccaggctagctacaacgaacgtcgct

SEQ ID NO: 17274 - DNA, 31 bp, Artificial Sequence
  Description of Artificial Sequence:  Enzymatic Nucleic Acid
ccgtaagaggctagctacaacgacacacgtc

SEQ ID NO: 17275 - DNA, 31 bp, Artificial Sequence
  Description of Artificial Sequence:  Enzymatic Nucleic Acid
atactccgggctagctacaacgaaagaccac

SEQ ID NO: 17276 - DNA, 31 bp, Artificial Sequence
  Description of Artificial Sequence:  Enzymatic Nucleic Acid
cagcaataggctagctacaacgatccgtaag

SEQ ID NO: 17277 - DNA, 31 bp, Artificial Sequence
  Description of Artificial Sequence:  Enzymatic Nucleic Acid
cacagcaaggctagctacaacgaactccgta

SEQ ID NO: 17278 - DNA, 31 bp, Artificial Sequence
  Description of Artificial Sequence:  Enzymatic Nucleic Acid
tcccacagggctagctacaacgaaatactcc

SEQ ID NO: 17279 - DNA, 31 bp, Artificial Sequence
  Description of Artificial Sequence:  Enzymatic Nucleic Acid
atttcccaggctagctacaacgaagcaatac

SEQ ID NO: 17280 - DNA, 31 bp, Artificial Sequence
  Description of Artificial Sequence:  Enzymatic Nucleic Acid
ggagaagaggctagctacaacgattcccaca

SEQ ID NO: 17281 - DNA, 31 bp, Artificial Sequence
  Description of Artificial Sequence:  Enzymatic Nucleic Acid
gagacccaggctagctacaacgactaaggag

SEQ ID NO: 17282 - DNA, 31 bp, Artificial Sequence
  Description of Artificial Sequence:  Enzymatic Nucleic Acid
tatggagaggctagctacaacgaccacctaa

SEQ ID NO: 17283 - DNA, 31 bp, Artificial Sequence
  Description of Artificial Sequence:  Enzymatic Nucleic Acid
cctgggtaggctagctacaacgaggagaccc

SEQ ID NO: 17284 - DNA, 31 bp, Artificial Sequence
  Description of Artificial Sequence:  Enzymatic Nucleic Acid
ctcctgggggctagctacaacgaatggagac

SEQ ID NO: 17285 - DNA, 31 bp, Artificial Sequence
  Description of Artificial Sequence:  Enzymatic Nucleic Acid
catttgtaggctagctacaacgatcctgggt

SEQ ID NO: 17286 - DNA, 31 bp, Artificial Sequence
  Description of Artificial Sequence:  Enzymatic Nucleic Acid
tccatttgggctagctacaacgaactcctgg

SEQ ID NO: 17287 - DNA, 31 bp, Artificial Sequence
  Description of Artificial Sequence:  Enzymatic Nucleic Acid
ctcatccaggctagctacaacgattgtactc

SEQ ID NO: 17288 - DNA, 31 bp, Artificial Sequence
  Description of Artificial Sequence:  Enzymatic Nucleic Acid
agtcctcaggctagctacaacgaccatttgt

SEQ ID NO: 17289 - DNA, 31 bp, Artificial Sequence
  Description of Artificial Sequence:  Enzymatic Nucleic Acid
tgcaaaagggctagctacaacgacctcatcc

SEQ ID NO: 17290 - DNA, 31 bp, Artificial Sequence
  Description of Artificial Sequence:  Enzymatic Nucleic Acid
ggcgactgggctagctacaacgaaaaagtcc

SEQ ID NO: 17291 - DNA, 31 bp, Artificial Sequence
  Description of Artificial Sequence:  Enzymatic Nucleic Acid
tcaggcgaggctagctacaacgatgcaaaag

SEQ ID NO: 17292 - DNA, 31 bp, Artificial Sequence
  Description of Artificial Sequence:  Enzymatic Nucleic Acid
ccctcaggggctagctacaacgagactgcaa

SEQ ID NO: 17293 - DNA, 31 bp, Artificial Sequence
  Description of Artificial Sequence:  Enzymatic Nucleic Acid
tcctcatgggctagctacaacgacttccctc

SEQ ID NO: 17294 - DNA, 31 bp, Artificial Sequence
  Description of Artificial Sequence:  Enzymatic Nucleic Acid
catcctcaggctagctacaacgagccttccc

SEQ ID NO: 17295 - DNA, 31 bp, Artificial Sequence
  Description of Artificial Sequence:  Enzymatic Nucleic Acid
agctctcaggctagctacaacgacctcatgc

SEQ ID NO: 17296 - DNA, 31 bp, Artificial Sequence
  Description of Artificial Sequence:  Enzymatic Nucleic Acid
ctcaggagggctagctacaacgatctcatcc

SEQ ID NO: 17297 - DNA, 31 bp, Artificial Sequence
  Description of Artificial Sequence:  Enzymatic Nucleic Acid
gtagagtaggctagctacaacgatcaggagc

SEQ ID NO: 17298 - DNA, 31 bp, Artificial Sequence
  Description of Artificial Sequence:  Enzymatic Nucleic Acid
gagtagagggctagctacaacgaactcagga

SEQ ID NO: 17299 - DNA, 31 bp, Artificial Sequence
  Description of Artificial Sequence:  Enzymatic Nucleic Acid
ttcaggagggctagctacaacgaagagtact

SEQ ID NO: 17300 - DNA, 31 bp, Artificial Sequence
  Description of Artificial Sequence:  Enzymatic Nucleic Acid
ctgatagaggctagctacaacgattcaggag

SEQ ID NO: 17301 - DNA, 31 bp, Artificial Sequence
  Description of Artificial Sequence:  Enzymatic Nucleic Acid
tgatctgaggctagctacaacgaagatttca

SEQ ID NO: 17302 - DNA, 31 bp, Artificial Sequence
  Description of Artificial Sequence:  Enzymatic Nucleic Acid
cagcatgaggctagctacaacgactgataga

SEQ ID NO: 17303 - DNA, 31 bp, Artificial Sequence
  Description of Artificial Sequence:  Enzymatic Nucleic Acid
gtccagcaggctagctacaacgagatctgat

SEQ ID NO: 17304 - DNA, 31 bp, Artificial Sequence
  Description of Artificial Sequence:  Enzymatic Nucleic Acid
cagtccagggctagctacaacgaatgatctg

SEQ ID NO: 17305 - DNA, 31 bp, Artificial Sequence
  Description of Artificial Sequence:  Enzymatic Nucleic Acid
gccagcagggctagctacaacgaccagcatg

SEQ ID NO: 17306 - DNA, 31 bp, Artificial Sequence
  Description of Artificial Sequence:  Enzymatic Nucleic Acid
tgtgccagggctagctacaacgaagtccagc

SEQ ID NO: 17307 - DNA, 31 bp, Artificial Sequence
  Description of Artificial Sequence:  Enzymatic Nucleic Acid
tctctgtgggctagctacaacgacagcagtc

SEQ ID NO: 17308 - DNA, 31 bp, Artificial Sequence
  Description of Artificial Sequence:  Enzymatic Nucleic Acid
ggtctctgggctagctacaacgagccagcag

SEQ ID NO: 17309 - DNA, 31 bp, Artificial Sequence
  Description of Artificial Sequence:  Enzymatic Nucleic Acid
cttttgggggctagctacaacgactctgtgc

SEQ ID NO: 17310 - DNA, 31 bp, Artificial Sequence
  Description of Artificial Sequence:  Enzymatic Nucleic Acid
aatcttggggctagctacaacgactttcttt

SEQ ID NO: 17311 - DNA, 31 bp, Artificial Sequence
  Description of Artificial Sequence:  Enzymatic Nucleic Acid
tctgcaaaggctagctacaacgacttggcct

SEQ ID NO: 17312 - DNA, 31 bp, Artificial Sequence
  Description of Artificial Sequence:  Enzymatic Nucleic Acid
aagttctgggctagctacaacgaaaatcttg

SEQ ID NO: 17313 - DNA, 31 bp, Artificial Sequence
  Description of Artificial Sequence:  Enzymatic Nucleic Acid
tccacaagggctagctacaacgatctgcaaa

SEQ ID NO: 17314 - DNA, 31 bp, Artificial Sequence
  Description of Artificial Sequence:  Enzymatic Nucleic Acid
tttttccaggctagctacaacgaaagttctg

SEQ ID NO: 17315 - DNA, 31 bp, Artificial Sequence
  Description of Artificial Sequence:  Enzymatic Nucleic Acid
tcacctagggctagctacaacgattttccac

SEQ ID NO: 17316 - DNA, 31 bp, Artificial Sequence
  Description of Artificial Sequence:  Enzymatic Nucleic Acid
gcaaatcaggctagctacaacgactagtttt

SEQ ID NO: 17317 - DNA, 31 bp, Artificial Sequence
  Description of Artificial Sequence:  Enzymatic Nucleic Acid
gaagcaaaggctagctacaacgacacctagt

SEQ ID NO: 17318 - DNA, 31 bp, Artificial Sequence
  Description of Artificial Sequence:  Enzymatic Nucleic Acid
gcttgaagggctagctacaacgaaaatcacc

SEQ ID NO: 17319 - DNA, 31 bp, Artificial Sequence
  Description of Artificial Sequence:  Enzymatic Nucleic Acid
tacatttgggctagctacaacgattgaagca

SEQ ID NO: 17320 - DNA, 31 bp, Artificial Sequence
  Description of Artificial Sequence:  Enzymatic Nucleic Acid
gttgtacaggctagctacaacgattgcttga

SEQ ID NO: 17321 - DNA, 31 bp, Artificial Sequence
  Description of Artificial Sequence:  Enzymatic Nucleic Acid
ctgttgtaggctagctacaacgaatttgctt

SEQ ID NO: 17322 - DNA, 31 bp, Artificial Sequence
  Description of Artificial Sequence:  Enzymatic Nucleic Acid
tcctgttgggctagctacaacgaacatttgc

SEQ ID NO: 17323 - DNA, 31 bp, Artificial Sequence
  Description of Artificial Sequence:  Enzymatic Nucleic Acid
ccatcctgggctagctacaacgatgtacatt

SEQ ID NO: 17324 - DNA, 31 bp, Artificial Sequence
  Description of Artificial Sequence:  Enzymatic Nucleic Acid
ctttaccaggctagctacaacgacctgttgt

SEQ ID NO: 17325 - DNA, 31 bp, Artificial Sequence
  Description of Artificial Sequence:  Enzymatic Nucleic Acid
agtctttaggctagctacaacgacatcctgt

SEQ ID NO: 17326 - DNA, 31 bp, Artificial Sequence
  Description of Artificial Sequence:  Enzymatic Nucleic Acid
ggatgtagggctagctacaacgactttacca

SEQ ID NO: 17327 - DNA, 31 bp, Artificial Sequence
  Description of Artificial Sequence:  Enzymatic Nucleic Acid
ttgggatgggctagctacaacgaagtcttta

SEQ ID NO: 17328 - DNA, 31 bp, Artificial Sequence
  Description of Artificial Sequence:  Enzymatic Nucleic Acid
gattgggaggctagctacaacgagtagtctt

SEQ ID NO: 17329 - DNA, 31 bp, Artificial Sequence
  Description of Artificial Sequence:  Enzymatic Nucleic Acid
ggcattgaggctagctacaacgatgggatgt

SEQ ID NO: 17330 - DNA, 31 bp, Artificial Sequence
  Description of Artificial Sequence:  Enzymatic Nucleic Acid
gtatggcaggctagctacaacgatgattggg

SEQ ID NO: 17331 - DNA, 31 bp, Artificial Sequence
  Description of Artificial Sequence:  Enzymatic Nucleic Acid
cagtatggggctagctacaacgaattgattg

SEQ ID NO: 17332 - DNA, 31 bp, Artificial Sequence
  Description of Artificial Sequence:  Enzymatic Nucleic Acid
tgtcagtaggctagctacaacgaggcattga

SEQ ID NO: 17333 - DNA, 31 bp, Artificial Sequence
  Description of Artificial Sequence:  Enzymatic Nucleic Acid
cctgtcagggctagctacaacgaatggcatt

SEQ ID NO: 17334 - DNA, 31 bp, Artificial Sequence
  Description of Artificial Sequence:  Enzymatic Nucleic Acid
atttcctgggctagctacaacgacagtatgg

SEQ ID NO: 17335 - DNA, 31 bp, Artificial Sequence
  Description of Artificial Sequence:  Enzymatic Nucleic Acid
acccactaggctagctacaacgattcctgtc

SEQ ID NO: 17336 - DNA, 31 bp, Artificial Sequence
  Description of Artificial Sequence:  Enzymatic Nucleic Acid
taaacccaggctagctacaacgatatttcct

SEQ ID NO: 17337 - DNA, 31 bp, Artificial Sequence
  Description of Artificial Sequence:  Enzymatic Nucleic Acid
tatgtaaaggctagctacaacgaccactatt

SEQ ID NO: 17338 - DNA, 31 bp, Artificial Sequence
  Description of Artificial Sequence:  Enzymatic Nucleic Acid
tgagtatgggctagctacaacgaaaacccac

SEQ ID NO: 17339 - DNA, 31 bp, Artificial Sequence
  Description of Artificial Sequence:  Enzymatic Nucleic Acid
gttgagtaggctagctacaacgagtaaaccc

SEQ ID NO: 17340 - DNA, 31 bp, Artificial Sequence
  Description of Artificial Sequence:  Enzymatic Nucleic Acid
gagttgagggctagctacaacgaatgtaaac

SEQ ID NO: 17341 - DNA, 31 bp, Artificial Sequence
  Description of Artificial Sequence:  Enzymatic Nucleic Acid
ggcaggagggctagctacaacgatgagtatg

SEQ ID NO: 17342 - DNA, 31 bp, Artificial Sequence
  Description of Artificial Sequence:  Enzymatic Nucleic Acid
agagaaggggctagctacaacgaaggagttg

SEQ ID NO: 17343 - DNA, 31 bp, Artificial Sequence
  Description of Artificial Sequence:  Enzymatic Nucleic Acid
tgaagaagggctagctacaacgacctcagag

SEQ ID NO: 17344 - DNA, 31 bp, Artificial Sequence
  Description of Artificial Sequence:  Enzymatic Nucleic Acid
ctgaaataggctagctacaacgatttccttg

SEQ ID NO: 17345 - DNA, 31 bp, Artificial Sequence
  Description of Artificial Sequence:  Enzymatic Nucleic Acid
agctgaaaggctagctacaacgaactttcct

SEQ ID NO: 17346 - DNA, 31 bp, Artificial Sequence
  Description of Artificial Sequence:  Enzymatic Nucleic Acid
cttcggagggctagctacaacgatgaaatac

SEQ ID NO: 17347 - DNA, 31 bp, Artificial Sequence
  Description of Artificial Sequence:  Enzymatic Nucleic Acid
gaattaaaggctagctacaacgattcggagc

SEQ ID NO: 17348 - DNA, 31 bp, Artificial Sequence
  Description of Artificial Sequence:  Enzymatic Nucleic Acid
ttcctgaaggctagctacaacgataaacttc

SEQ ID NO: 17349 - DNA, 31 bp, Artificial Sequence
  Description of Artificial Sequence:  Enzymatic Nucleic Acid
catcagagggctagctacaacgattcctgaa

SEQ ID NO: 17350 - DNA, 31 bp, Artificial Sequence
  Description of Artificial Sequence:  Enzymatic Nucleic Acid
tgacatcaggctagctacaacgacagagctt

SEQ ID NO: 17351 - DNA, 31 bp, Artificial Sequence
  Description of Artificial Sequence:  Enzymatic Nucleic Acid
atctgacaggctagctacaacgacatcagag

SEQ ID NO: 17352 - DNA, 31 bp, Artificial Sequence
  Description of Artificial Sequence:  Enzymatic Nucleic Acid
atatctgaggctagctacaacgaatcatcag

SEQ ID NO: 17353 - DNA, 31 bp, Artificial Sequence
  Description of Artificial Sequence:  Enzymatic Nucleic Acid
tttacataggctagctacaacgactgacatc

SEQ ID NO: 17354 - DNA, 31 bp, Artificial Sequence
  Description of Artificial Sequence:  Enzymatic Nucleic Acid
catttacaggctagctacaacgaatctgaca

SEQ ID NO: 17355 - DNA, 31 bp, Artificial Sequence
  Description of Artificial Sequence:  Enzymatic Nucleic Acid
agcatttaggctagctacaacgaatatctga

SEQ ID NO: 17356 - DNA, 31 bp, Artificial Sequence
  Description of Artificial Sequence:  Enzymatic Nucleic Acid
tgaaagcaggctagctacaacgattacatat

SEQ ID NO: 17357 - DNA, 31 bp, Artificial Sequence
  Description of Artificial Sequence:  Enzymatic Nucleic Acid
cttgaaagggctagctacaacgaatttacat

SEQ ID NO: 17358 - DNA, 31 bp, Artificial Sequence
  Description of Artificial Sequence:  Enzymatic Nucleic Acid
ctcatgaaggctagctacaacgattgaaagc

SEQ ID NO: 17359 - DNA, 31 bp, Artificial Sequence
  Description of Artificial Sequence:  Enzymatic Nucleic Acid
caggctcaggctagctacaacgagaacttga

SEQ ID NO: 17360 - DNA, 31 bp, Artificial Sequence
  Description of Artificial Sequence:  Enzymatic Nucleic Acid
tttccaggggctagctacaacgatcatgaac

SEQ ID NO: 17361 - DNA, 31 bp, Artificial Sequence
  Description of Artificial Sequence:  Enzymatic Nucleic Acid
ggttttgaggctagctacaacgatctttcca

SEQ ID NO: 17362 - DNA, 31 bp, Artificial Sequence
  Description of Artificial Sequence:  Enzymatic Nucleic Acid
ttcaaaggggctagctacaacgatttgattc

SEQ ID NO: 17363 - DNA, 31 bp, Artificial Sequence
  Description of Artificial Sequence:  Enzymatic Nucleic Acid
ggtaaaagggctagctacaacgatcttcaaa

SEQ ID NO: 17364 - DNA, 31 bp, Artificial Sequence
  Description of Artificial Sequence:  Enzymatic Nucleic Acid
gcattcggggctagctacaacgaaaaagttc

SEQ ID NO: 17365 - DNA, 31 bp, Artificial Sequence
  Description of Artificial Sequence:  Enzymatic Nucleic Acid
aggtggcaggctagctacaacgatcggtaaa

SEQ ID NO: 17366 - DNA, 31 bp, Artificial Sequence
  Description of Artificial Sequence:  Enzymatic Nucleic Acid
ggaggtggggctagctacaacgaattcggta

SEQ ID NO: 17367 - DNA, 31 bp, Artificial Sequence
  Description of Artificial Sequence:  Enzymatic Nucleic Acid
catggaggggctagctacaacgaggcattcg

SEQ ID NO: 17368 - DNA, 31 bp, Artificial Sequence
  Description of Artificial Sequence:  Enzymatic Nucleic Acid
atcaaacaggctagctacaacgaggaggtgg

SEQ ID NO: 17369 - DNA, 31 bp, Artificial Sequence
  Description of Artificial Sequence:  Enzymatic Nucleic Acid
tcatcaaaggctagctacaacgaatggaggt

SEQ ID NO: 17370 - DNA, 31 bp, Artificial Sequence
  Description of Artificial Sequence:  Enzymatic Nucleic Acid
ggtagtcaggctagctacaacgacaaacatg

SEQ ID NO: 17371 - DNA, 31 bp, Artificial Sequence
  Description of Artificial Sequence:  Enzymatic Nucleic Acid
cctggtagggctagctacaacgacatcaaac

SEQ ID NO: 17372 - DNA, 31 bp, Artificial Sequence
  Description of Artificial Sequence:  Enzymatic Nucleic Acid
cgccctggggctagctacaacgaagtcatca

SEQ ID NO: 17373 - DNA, 31 bp, Artificial Sequence
  Description of Artificial Sequence:  Enzymatic Nucleic Acid
tgctgtcgggctagctacaacgacctggtag

SEQ ID NO: 17374 - DNA, 31 bp, Artificial Sequence
  Description of Artificial Sequence:  Enzymatic Nucleic Acid
tgctgctgggctagctacaacgacgccctgg

SEQ ID NO: 17375 - DNA, 31 bp, Artificial Sequence
  Description of Artificial Sequence:  Enzymatic Nucleic Acid
gagtgctgggctagctacaacgatgtcgccc

SEQ ID NO: 17376 - DNA, 31 bp, Artificial Sequence
  Description of Artificial Sequence:  Enzymatic Nucleic Acid
acagagtgggctagctacaacgatgctgtcg

SEQ ID NO: 17377 - DNA, 31 bp, Artificial Sequence
  Description of Artificial Sequence:  Enzymatic Nucleic Acid
caacagagggctagctacaacgagctgctgt

SEQ ID NO: 17378 - DNA, 31 bp, Artificial Sequence
  Description of Artificial Sequence:  Enzymatic Nucleic Acid
gaggccaaggctagctacaacgaagagtgct

SEQ ID NO: 17379 - DNA, 31 bp, Artificial Sequence
  Description of Artificial Sequence:  Enzymatic Nucleic Acid
gggagaggggctagctacaacgacaacagag

SEQ ID NO: 17380 - DNA, 31 bp, Artificial Sequence
  Description of Artificial Sequence:  Enzymatic Nucleic Acid
cttcagcaggctagctacaacgagggagagg

SEQ ID NO: 17381 - DNA, 31 bp, Artificial Sequence
  Description of Artificial Sequence:  Enzymatic Nucleic Acid
cgcttcagggctagctacaacgaatgggaga

SEQ ID NO: 17382 - DNA, 31 bp, Artificial Sequence
  Description of Artificial Sequence:  Enzymatic Nucleic Acid
gtgaagcgggctagctacaacgattcagcat

SEQ ID NO: 17383 - DNA, 31 bp, Artificial Sequence
  Description of Artificial Sequence:  Enzymatic Nucleic Acid
aggtgaagggctagctacaacgagcttcagc

SEQ ID NO: 17384 - DNA, 31 bp, Artificial Sequence
  Description of Artificial Sequence:  Enzymatic Nucleic Acid
agtccaggggctagctacaacgagaagcgct

SEQ ID NO: 17385 - DNA, 31 bp, Artificial Sequence
  Description of Artificial Sequence:  Enzymatic Nucleic Acid
gctgtcagggctagctacaacgaccaggtga

SEQ ID NO: 17386 - DNA, 31 bp, Artificial Sequence
  Description of Artificial Sequence:  Enzymatic Nucleic Acid
gtttgctgggctagctacaacgacagtccag

SEQ ID NO: 17387 - DNA, 31 bp, Artificial Sequence
  Description of Artificial Sequence:  Enzymatic Nucleic Acid
tgggtttgggctagctacaacgatgtcagtc

SEQ ID NO: 17388 - DNA, 31 bp, Artificial Sequence
  Description of Artificial Sequence:  Enzymatic Nucleic Acid
gccttgggggctagctacaacgattgctgtc

SEQ ID NO: 17389 - DNA, 31 bp, Artificial Sequence
  Description of Artificial Sequence:  Enzymatic Nucleic Acid
gagcgaggggctagctacaacgacttgggtt

SEQ ID NO: 17390 - DNA, 31 bp, Artificial Sequence
  Description of Artificial Sequence:  Enzymatic Nucleic Acid
atcttgagggctagctacaacgagaggcctt

SEQ ID NO: 17391 - DNA, 31 bp, Artificial Sequence
  Description of Artificial Sequence:  Enzymatic Nucleic Acid
caagtcaaggctagctacaacgacttgagcg

SEQ ID NO: 17392 - DNA, 31 bp, Artificial Sequence
  Description of Artificial Sequence:  Enzymatic Nucleic Acid
ctctcaagggctagctacaacgacaatcttg

SEQ ID NO: 17393 - DNA, 31 bp, Artificial Sequence
  Description of Artificial Sequence:  Enzymatic Nucleic Acid
actggttaggctagctacaacgatctcaagt

SEQ ID NO: 17394 - DNA, 31 bp, Artificial Sequence
  Description of Artificial Sequence:  Enzymatic Nucleic Acid
tttactggggctagctacaacgatactctca

SEQ ID NO: 17395 - DNA, 31 bp, Artificial Sequence
  Description of Artificial Sequence:  Enzymatic Nucleic Acid
tacttttaggctagctacaacgatggttact

SEQ ID NO: 17396 - DNA, 31 bp, Artificial Sequence
  Description of Artificial Sequence:  Enzymatic Nucleic Acid
actccttaggctagctacaacgattttactg

SEQ ID NO: 17397 - DNA, 31 bp, Artificial Sequence
  Description of Artificial Sequence:  Enzymatic Nucleic Acid
agccccgaggctagctacaacgatccttact

SEQ ID NO: 17398 - DNA, 31 bp, Artificial Sequence
  Description of Artificial Sequence:  Enzymatic Nucleic Acid
tcagacagggctagctacaacgacccgactc

SEQ ID NO: 17399 - DNA, 31 bp, Artificial Sequence
  Description of Artificial Sequence:  Enzymatic Nucleic Acid
acatcagaggctagctacaacgaagccccga

SEQ ID NO: 17400 - DNA, 31 bp, Artificial Sequence
  Description of Artificial Sequence:  Enzymatic Nucleic Acid
tgctgacaggctagctacaacgacagacagc

SEQ ID NO: 17401 - DNA, 31 bp, Artificial Sequence
  Description of Artificial Sequence:  Enzymatic Nucleic Acid
cctgctgaggctagctacaacgaatcagaca

SEQ ID NO: 17402 - DNA, 31 bp, Artificial Sequence
  Description of Artificial Sequence:  Enzymatic Nucleic Acid
tgggcctgggctagctacaacgatgacatca

SEQ ID NO: 17403 - DNA, 31 bp, Artificial Sequence
  Description of Artificial Sequence:  Enzymatic Nucleic Acid
aaactgggggctagctacaacgactgctgac

SEQ ID NO: 17404 - DNA, 31 bp, Artificial Sequence
  Description of Artificial Sequence:  Enzymatic Nucleic Acid
ggcagaaaggctagctacaacgatgggcctg

SEQ ID NO: 17405 - DNA, 31 bp, Artificial Sequence
  Description of Artificial Sequence:  Enzymatic Nucleic Acid
tggaatggggctagctacaacgaagaaactg

SEQ ID NO: 17406 - DNA, 31 bp, Artificial Sequence
  Description of Artificial Sequence:  Enzymatic Nucleic Acid
agctggaaggctagctacaacgaggcagaaa

SEQ ID NO: 17407 - DNA, 31 bp, Artificial Sequence
  Description of Artificial Sequence:  Enzymatic Nucleic Acid
gcccacagggctagctacaacgatggaatgg

SEQ ID NO: 17408 - DNA, 31 bp, Artificial Sequence
  Description of Artificial Sequence:  Enzymatic Nucleic Acid
cgtgcccaggctagctacaacgaagctggaa

SEQ ID NO: 17409 - DNA, 31 bp, Artificial Sequence
  Description of Artificial Sequence:  Enzymatic Nucleic Acid
ctgacgtgggctagctacaacgaccacagct

SEQ ID NO: 17410 - DNA, 31 bp, Artificial Sequence
  Description of Artificial Sequence:  Enzymatic Nucleic Acid
cgctgacgggctagctacaacgagcccacag

SEQ ID NO: 17411 - DNA, 31 bp, Artificial Sequence
  Description of Artificial Sequence:  Enzymatic Nucleic Acid
ttcgctgaggctagctacaacgagtgcccac

SEQ ID NO: 17412 - DNA, 31 bp, Artificial Sequence
  Description of Artificial Sequence:  Enzymatic Nucleic Acid
tgccttcgggctagctacaacgatgacgtgc

SEQ ID NO: 17413 - DNA, 31 bp, Artificial Sequence
  Description of Artificial Sequence:  Enzymatic Nucleic Acid
tgcgcttgggctagctacaacgacttcgctg

SEQ ID NO: 17414 - DNA, 31 bp, Artificial Sequence
  Description of Artificial Sequence:  Enzymatic Nucleic Acid
aacctgcgggctagctacaacgattgccttc

SEQ ID NO: 17415 - DNA, 31 bp, Artificial Sequence
  Description of Artificial Sequence:  Enzymatic Nucleic Acid
tgaacctgggctagctacaacgagcttgcct

SEQ ID NO: 17416 - DNA, 31 bp, Artificial Sequence
  Description of Artificial Sequence:  Enzymatic Nucleic Acid
taggtgaaggctagctacaacgactgcgctt

SEQ ID NO: 17417 - DNA, 31 bp, Artificial Sequence
  Description of Artificial Sequence:  Enzymatic Nucleic Acid
gtcgtaggggctagctacaacgagaacctgc

SEQ ID NO: 17418 - DNA, 31 bp, Artificial Sequence
  Description of Artificial Sequence:  Enzymatic Nucleic Acid
cgtggtcgggctagctacaacgaaggtgaac

SEQ ID NO: 17419 - DNA, 31 bp, Artificial Sequence
  Description of Artificial Sequence:  Enzymatic Nucleic Acid
cagcgtggggctagctacaacgacgtaggtg

SEQ ID NO: 17420 - DNA, 31 bp, Artificial Sequence
  Description of Artificial Sequence:  Enzymatic Nucleic Acid
gctcagcgggctagctacaacgaggtcgtag

SEQ ID NO: 17421 - DNA, 31 bp, Artificial Sequence
  Description of Artificial Sequence:  Enzymatic Nucleic Acid
cagctcagggctagctacaacgagtggtcgt

SEQ ID NO: 17422 - DNA, 31 bp, Artificial Sequence
  Description of Artificial Sequence:  Enzymatic Nucleic Acid
ctttccagggctagctacaacgatcagcgtg

SEQ ID NO: 17423 - DNA, 31 bp, Artificial Sequence
  Description of Artificial Sequence:  Enzymatic Nucleic Acid
gcacgcgaggctagctacaacgatttccttt

SEQ ID NO: 17424 - DNA, 31 bp, Artificial Sequence
  Description of Artificial Sequence:  Enzymatic Nucleic Acid
gcagcacgggctagctacaacgagattttcc

SEQ ID NO: 17425 - DNA, 31 bp, Artificial Sequence
  Description of Artificial Sequence:  Enzymatic Nucleic Acid
gagcagcaggctagctacaacgagcgatttt

SEQ ID NO: 17426 - DNA, 31 bp, Artificial Sequence
  Description of Artificial Sequence:  Enzymatic Nucleic Acid
gggagcagggctagctacaacgaacgcgatt

SEQ ID NO: 17427 - DNA, 31 bp, Artificial Sequence
  Description of Artificial Sequence:  Enzymatic Nucleic Acid
gcggggagggctagctacaacgaagcacgcg

SEQ ID NO: 17428 - DNA, 31 bp, Artificial Sequence
  Description of Artificial Sequence:  Enzymatic Nucleic Acid
tctgggggggctagctacaacgaggggagca

SEQ ID NO: 17429 - DNA, 31 bp, Artificial Sequence
  Description of Artificial Sequence:  Enzymatic Nucleic Acid
agttgtagggctagctacaacgactgggggc

SEQ ID NO: 17430 - DNA, 31 bp, Artificial Sequence
  Description of Artificial Sequence:  Enzymatic Nucleic Acid
ccgagttgggctagctacaacgaagtctggg

SEQ ID NO: 17431 - DNA, 31 bp, Artificial Sequence
  Description of Artificial Sequence:  Enzymatic Nucleic Acid
ccaccgagggctagctacaacgatgtagtct

SEQ ID NO: 17432 - DNA, 31 bp, Artificial Sequence
  Description of Artificial Sequence:  Enzymatic Nucleic Acid
caggaccaggctagctacaacgacgagttgt

SEQ ID NO: 17433 - DNA, 31 bp, Artificial Sequence
  Description of Artificial Sequence:  Enzymatic Nucleic Acid
gtacaggaggctagctacaacgacaccgagt

SEQ ID NO: 17434 - DNA, 31 bp, Artificial Sequence
  Description of Artificial Sequence:  Enzymatic Nucleic Acid
gtggagtaggctagctacaacgaaggaccac

SEQ ID NO: 17435 - DNA, 31 bp, Artificial Sequence
  Description of Artificial Sequence:  Enzymatic Nucleic Acid
gggtggagggctagctacaacgaacaggacc

SEQ ID NO: 17436 - DNA, 31 bp, Artificial Sequence
  Description of Artificial Sequence:  Enzymatic Nucleic Acid
gggtggggggctagctacaacgaggagtaca

SEQ ID NO: 17437 - DNA, 31 bp, Artificial Sequence
  Description of Artificial Sequence:  Enzymatic Nucleic Acid
tagatgggggctagctacaacgaggggtgga

SEQ ID NO: 17438 - DNA, 31 bp, Artificial Sequence
  Description of Artificial Sequence:  Enzymatic Nucleic Acid
actctagaggctagctacaacgagggtgggg

SEQ ID NO: 17439 - DNA, 31 bp, Artificial Sequence
  Description of Artificial Sequence:  Enzymatic Nucleic Acid
gtgtcaaaggctagctacaacgatctagatg

SEQ ID NO: 17440 - DNA, 31 bp, Artificial Sequence
  Description of Artificial Sequence:  Enzymatic Nucleic Acid
gcttcgtgggctagctacaacgacaaactct

SEQ ID NO: 17441 - DNA, 31 bp, Artificial Sequence
  Description of Artificial Sequence:  Enzymatic Nucleic Acid
aggcttcgggctagctacaacgagtcaaact

SEQ ID NO: 17442 - DNA, 31 bp, Artificial Sequence
  Description of Artificial Sequence:  Enzymatic Nucleic Acid
aaataaggggctagctacaacgattcgtgtc

SEQ ID NO: 17443 - DNA, 31 bp, Artificial Sequence
  Description of Artificial Sequence:  Enzymatic Nucleic Acid
tctagaaaggctagctacaacgaaaggcttc

SEQ ID NO: 17444 - DNA, 31 bp, Artificial Sequence
  Description of Artificial Sequence:  Enzymatic Nucleic Acid
cacatgtgggctagctacaacgattctagaa

SEQ ID NO: 17445 - DNA, 31 bp, Artificial Sequence
  Description of Artificial Sequence:  Enzymatic Nucleic Acid
tacacatgggctagctacaacgagcttctag

SEQ ID NO: 17446 - DNA, 31 bp, Artificial Sequence
  Description of Artificial Sequence:  Enzymatic Nucleic Acid
aatacacaggctagctacaacgagtgcttct

SEQ ID NO: 17447 - DNA, 31 bp, Artificial Sequence
  Description of Artificial Sequence:  Enzymatic Nucleic Acid
taaatacaggctagctacaacgaatgtgctt

SEQ ID NO: 17448 - DNA, 31 bp, Artificial Sequence
  Description of Artificial Sequence:  Enzymatic Nucleic Acid
tataaataggctagctacaacgaacatgtgc

SEQ ID NO: 17449 - DNA, 31 bp, Artificial Sequence
  Description of Artificial Sequence:  Enzymatic Nucleic Acid
ggtataaaggctagctacaacgaacacatgt

SEQ ID NO: 17450 - DNA, 31 bp, Artificial Sequence
  Description of Artificial Sequence:  Enzymatic Nucleic Acid
tgggggtaggctagctacaacgaaaatacac

SEQ ID NO: 17451 - DNA, 31 bp, Artificial Sequence
  Description of Artificial Sequence:  Enzymatic Nucleic Acid
cctgggggggctagctacaacgaataaatac

SEQ ID NO: 17452 - DNA, 31 bp, Artificial Sequence
  Description of Artificial Sequence:  Enzymatic Nucleic Acid
aaagctagggctagctacaacgattcctggg

SEQ ID NO: 17453 - DNA, 31 bp, Artificial Sequence
  Description of Artificial Sequence:  Enzymatic Nucleic Acid
ggcaaaagggctagctacaacgatagtttcc

SEQ ID NO: 17454 - DNA, 31 bp, Artificial Sequence
  Description of Artificial Sequence:  Enzymatic Nucleic Acid
aatactggggctagctacaacgaaaaagcta

SEQ ID NO: 17455 - DNA, 31 bp, Artificial Sequence
  Description of Artificial Sequence:  Enzymatic Nucleic Acid
gcataataggctagctacaacgatggcaaaa

SEQ ID NO: 17456 - DNA, 31 bp, Artificial Sequence
  Description of Artificial Sequence:  Enzymatic Nucleic Acid
atgcataaggctagctacaacgaactggcaa

SEQ ID NO: 17457 - DNA, 31 bp, Artificial Sequence
  Description of Artificial Sequence:  Enzymatic Nucleic Acid
tatatgcaggctagctacaacgaaatactgg

SEQ ID NO: 17458 - DNA, 31 bp, Artificial Sequence
  Description of Artificial Sequence:  Enzymatic Nucleic Acid
tatatatgggctagctacaacgaataatact

SEQ ID NO: 17459 - DNA, 31 bp, Artificial Sequence
  Description of Artificial Sequence:  Enzymatic Nucleic Acid
cttatataggctagctacaacgagcataata

SEQ ID NO: 17460 - DNA, 31 bp, Artificial Sequence
  Description of Artificial Sequence:  Enzymatic Nucleic Acid
aacttataggctagctacaacgaatgcataa

SEQ ID NO: 17461 - DNA, 31 bp, Artificial Sequence
  Description of Artificial Sequence:  Enzymatic Nucleic Acid
taaacttaggctagctacaacgaatatgcat

SEQ ID NO: 17462 - DNA, 31 bp, Artificial Sequence
  Description of Artificial Sequence:  Enzymatic Nucleic Acid
ggtgtaaaggctagctacaacgattatatat

SEQ ID NO: 17463 - DNA, 31 bp, Artificial Sequence
  Description of Artificial Sequence:  Enzymatic Nucleic Acid
taaaggtgggctagctacaacgaaaacttat

SEQ ID NO: 17464 - DNA, 31 bp, Artificial Sequence
  Description of Artificial Sequence:  Enzymatic Nucleic Acid
gataaaggggctagctacaacgagtaaactt

SEQ ID NO: 17465 - DNA, 31 bp, Artificial Sequence
  Description of Artificial Sequence:  Enzymatic Nucleic Acid
tggaaagaggctagctacaacgaaaaggtgt

SEQ ID NO: 17466 - DNA, 31 bp, Artificial Sequence
  Description of Artificial Sequence:  Enzymatic Nucleic Acid
ggctcccaggctagctacaacgaggaaagat

SEQ ID NO: 17467 - DNA, 31 bp, Artificial Sequence
  Description of Artificial Sequence:  Enzymatic Nucleic Acid
gcagctggggctagctacaacgatcccatgg

SEQ ID NO: 17468 - DNA, 31 bp, Artificial Sequence
  Description of Artificial Sequence:  Enzymatic Nucleic Acid
aaaagcagggctagctacaacgatggctccc

SEQ ID NO: 17469 - DNA, 31 bp, Artificial Sequence
  Description of Artificial Sequence:  Enzymatic Nucleic Acid
acaaaaagggctagctacaacgaagctggct

SEQ ID NO: 17470 - DNA, 31 bp, Artificial Sequence
  Description of Artificial Sequence:  Enzymatic Nucleic Acid
aaaaatcaggctagctacaacgaaaaaagca

SEQ ID NO: 17471 - DNA, 31 bp, Artificial Sequence
  Description of Artificial Sequence:  Enzymatic Nucleic Acid
taaaaaaaggctagctacaacgacacaaaaa

SEQ ID NO: 17472 - DNA, 31 bp, Artificial Sequence
  Description of Artificial Sequence:  Enzymatic Nucleic Acid
aagcactaggctagctacaacgataaaaaaa

SEQ ID NO: 17473 - DNA, 31 bp, Artificial Sequence
  Description of Artificial Sequence:  Enzymatic Nucleic Acid
aaaaagcaggctagctacaacgatattaaaa

SEQ ID NO: 17474 - DNA, 31 bp, Artificial Sequence
  Description of Artificial Sequence:  Enzymatic Nucleic Acid
aaaaaaagggctagctacaacgaactattaa

SEQ ID NO: 17475 - DNA, 31 bp, Artificial Sequence
  Description of Artificial Sequence:  Enzymatic Nucleic Acid
cttgttagggctagctacaacgacaaaaaaa

SEQ ID NO: 17476 - DNA, 31 bp, Artificial Sequence
  Description of Artificial Sequence:  Enzymatic Nucleic Acid
cattcttgggctagctacaacgatagtcaaa

SEQ ID NO: 17477 - DNA, 31 bp, Artificial Sequence
  Description of Artificial Sequence:  Enzymatic Nucleic Acid
gagttacaggctagctacaacgatcttgtta

SEQ ID NO: 17478 - DNA, 31 bp, Artificial Sequence
  Description of Artificial Sequence:  Enzymatic Nucleic Acid
tggagttaggctagctacaacgaattcttgt

SEQ ID NO: 17479 - DNA, 31 bp, Artificial Sequence
  Description of Artificial Sequence:  Enzymatic Nucleic Acid
atctggagggctagctacaacgatacattct

SEQ ID NO: 17480 - DNA, 31 bp, Artificial Sequence
  Description of Artificial Sequence:  Enzymatic Nucleic Acid
tttctctaggctagctacaacgactggagtt

SEQ ID NO: 17481 - DNA, 31 bp, Artificial Sequence
  Description of Artificial Sequence:  Enzymatic Nucleic Acid
tgtcactaggctagctacaacgattctctat

SEQ ID NO: 17482 - DNA, 31 bp, Artificial Sequence
  Description of Artificial Sequence:  Enzymatic Nucleic Acid
acttgtcaggctagctacaacgatatttctc

SEQ ID NO: 17483 - DNA, 31 bp, Artificial Sequence
  Description of Artificial Sequence:  Enzymatic Nucleic Acid
ttcacttgggctagctacaacgacactattt

SEQ ID NO: 17484 - DNA, 31 bp, Artificial Sequence
  Description of Artificial Sequence:  Enzymatic Nucleic Acid
gttcttcaggctagctacaacgattgtcact

SEQ ID NO: 17485 - DNA, 31 bp, Artificial Sequence
  Description of Artificial Sequence:  Enzymatic Nucleic Acid
cagtagtgggctagctacaacgatcttcact

SEQ ID NO: 17486 - DNA, 31 bp, Artificial Sequence
  Description of Artificial Sequence:  Enzymatic Nucleic Acid
agcagtagggctagctacaacgagttcttca

SEQ ID NO: 17487 - DNA, 31 bp, Artificial Sequence
  Description of Artificial Sequence:  Enzymatic Nucleic Acid
tttagcagggctagctacaacgaagtgttct

SEQ ID NO: 17488 - DNA, 31 bp, Artificial Sequence
  Description of Artificial Sequence:  Enzymatic Nucleic Acid
ggatttagggctagctacaacgaagtagtgt

SEQ ID NO: 17489 - DNA, 31 bp, Artificial Sequence
  Description of Artificial Sequence:  Enzymatic Nucleic Acid
catgaggaggctagctacaacgattagcagt

SEQ ID NO: 17490 - DNA, 31 bp, Artificial Sequence
  Description of Artificial Sequence:  Enzymatic Nucleic Acid
gagtaacaggctagctacaacgagaggattt

SEQ ID NO: 17491 - DNA, 31 bp, Artificial Sequence
  Description of Artificial Sequence:  Enzymatic Nucleic Acid
ctgagtaaggctagctacaacgaatgaggat

SEQ ID NO: 17492 - DNA, 31 bp, Artificial Sequence
  Description of Artificial Sequence:  Enzymatic Nucleic Acid
acactgagggctagctacaacgaaacatgag

SEQ ID NO: 17493 - DNA, 31 bp, Artificial Sequence
  Description of Artificial Sequence:  Enzymatic Nucleic Acid
ctctaacaggctagctacaacgatgagtaac

SEQ ID NO: 17494 - DNA, 31 bp, Artificial Sequence
  Description of Artificial Sequence:  Enzymatic Nucleic Acid
ttctctaaggctagctacaacgaactgagta

SEQ ID NO: 17495 - DNA, 31 bp, Artificial Sequence
  Description of Artificial Sequence:  Enzymatic Nucleic Acid
aggaaggaggctagctacaacgattctctaa

SEQ ID NO: 17496 - DNA, 31 bp, Artificial Sequence
  Description of Artificial Sequence:  Enzymatic Nucleic Acid
tcattgggggctagctacaacgattaggaag

SEQ ID NO: 17497 - DNA, 31 bp, Artificial Sequence
  Description of Artificial Sequence:  Enzymatic Nucleic Acid
ggaagtcaggctagctacaacgatgggttta

SEQ ID NO: 17498 - DNA, 31 bp, Artificial Sequence
  Description of Artificial Sequence:  Enzymatic Nucleic Acid
cagggaagggctagctacaacgacattgggt

SEQ ID NO: 17499 - DNA, 31 bp, Artificial Sequence
  Description of Artificial Sequence:  Enzymatic Nucleic Acid
ggttggagggctagctacaacgaagggaagt

SEQ ID NO: 17500 - DNA, 31 bp, Artificial Sequence
  Description of Artificial Sequence:  Enzymatic Nucleic Acid
ggcgggggggctagctacaacgatggagcag

SEQ ID NO: 17501 - DNA, 31 bp, Artificial Sequence
  Description of Artificial Sequence:  Enzymatic Nucleic Acid
tgaggtggggctagctacaacgagggggttg

SEQ ID NO: 17502 - DNA, 31 bp, Artificial Sequence
  Description of Artificial Sequence:  Enzymatic Nucleic Acid
ccctgaggggctagctacaacgaggcggggg

SEQ ID NO: 17503 - DNA, 31 bp, Artificial Sequence
  Description of Artificial Sequence:  Enzymatic Nucleic Acid
cctgcgtgggctagctacaacgacctgaggt

SEQ ID NO: 17504 - DNA, 31 bp, Artificial Sequence
  Description of Artificial Sequence:  Enzymatic Nucleic Acid
gtcctgcgggctagctacaacgagccctgag

SEQ ID NO: 17505 - DNA, 31 bp, Artificial Sequence
  Description of Artificial Sequence:  Enzymatic Nucleic Acid
tggtcctgggctagctacaacgagtgccctg

SEQ ID NO: 17506 - DNA, 31 bp, Artificial Sequence
  Description of Artificial Sequence:  Enzymatic Nucleic Acid
caaactggggctagctacaacgacctgcgtg

SEQ ID NO: 17507 - DNA, 31 bp, Artificial Sequence
  Description of Artificial Sequence:  Enzymatic Nucleic Acid
caatcaaaggctagctacaacgatggtcctg

SEQ ID NO: 17508 - DNA, 31 bp, Artificial Sequence
  Description of Artificial Sequence:  Enzymatic Nucleic Acid
ctcctcaaggctagctacaacgacaaactgg

SEQ ID NO: 17509 - DNA, 31 bp, Artificial Sequence
  Description of Artificial Sequence:  Enzymatic Nucleic Acid
cagtgcagggctagctacaacgatcctcaat

SEQ ID NO: 17510 - DNA, 31 bp, Artificial Sequence
  Description of Artificial Sequence:  Enzymatic Nucleic Acid
gatcagtgggctagctacaacgaagctcctc

SEQ ID NO: 17511 - DNA, 31 bp, Artificial Sequence
  Description of Artificial Sequence:  Enzymatic Nucleic Acid
gtgatcagggctagctacaacgagcagctcc

SEQ ID NO: 17512 - DNA, 31 bp, Artificial Sequence
  Description of Artificial Sequence:  Enzymatic Nucleic Acid
ttgggtgaggctagctacaacgacagtgcag

SEQ ID NO: 17513 - DNA, 31 bp, Artificial Sequence
  Description of Artificial Sequence:  Enzymatic Nucleic Acid
gcattgggggctagctacaacgagatcagtg

SEQ ID NO: 17514 - DNA, 31 bp, Artificial Sequence
  Description of Artificial Sequence:  Enzymatic Nucleic Acid
gtgatgcaggctagctacaacgatgggtgat

SEQ ID NO: 17515 - DNA, 31 bp, Artificial Sequence
  Description of Artificial Sequence:  Enzymatic Nucleic Acid
acgtgatgggctagctacaacgaattgggtg

SEQ ID NO: 17516 - DNA, 31 bp, Artificial Sequence
  Description of Artificial Sequence:  Enzymatic Nucleic Acid
gtacgtgaggctagctacaacgagcattggg

SEQ ID NO: 17517 - DNA, 31 bp, Artificial Sequence
  Description of Artificial Sequence:  Enzymatic Nucleic Acid
ggggtacgggctagctacaacgagatgcatt

SEQ ID NO: 17518 - DNA, 31 bp, Artificial Sequence
  Description of Artificial Sequence:  Enzymatic Nucleic Acid
gtggggtaggctagctacaacgagtgatgca

SEQ ID NO: 17519 - DNA, 31 bp, Artificial Sequence
  Description of Artificial Sequence:  Enzymatic Nucleic Acid
cagtggggggctagctacaacgaacgtgatg

SEQ ID NO: 17520 - DNA, 31 bp, Artificial Sequence
  Description of Artificial Sequence:  Enzymatic Nucleic Acid
tggcccagggctagctacaacgaggggtacg

SEQ ID NO: 17521 - DNA, 31 bp, Artificial Sequence
  Description of Artificial Sequence:  Enzymatic Nucleic Acid
agggctggggctagctacaacgaccagtggg

SEQ ID NO: 17522 - DNA, 31 bp, Artificial Sequence
  Description of Artificial Sequence:  Enzymatic Nucleic Acid
ctgcagggggctagctacaacgatggcccag

SEQ ID NO: 17523 - DNA, 31 bp, Artificial Sequence
  Description of Artificial Sequence:  Enzymatic Nucleic Acid
ttgggctgggctagctacaacgaagggctgg

SEQ ID NO: 17524 - DNA, 31 bp, Artificial Sequence
  Description of Artificial Sequence:  Enzymatic Nucleic Acid
gttttgggggctagctacaacgatgcagggc

SEQ ID NO: 17525 - DNA, 31 bp, Artificial Sequence
  Description of Artificial Sequence:  Enzymatic Nucleic Acid
gccctgggggctagctacaacgatttgggct

SEQ ID NO: 17526 - DNA, 31 bp, Artificial Sequence
  Description of Artificial Sequence:  Enzymatic Nucleic Acid
gcttgttgggctagctacaacgacctgggtt

SEQ ID NO: 17527 - DNA, 31 bp, Artificial Sequence
  Description of Artificial Sequence:  Enzymatic Nucleic Acid
cgggcttgggctagctacaacgatgccctgg

SEQ ID NO: 17528 - DNA, 31 bp, Artificial Sequence
  Description of Artificial Sequence:  Enzymatic Nucleic Acid
ctaacgggggctagctacaacgattgttgcc

SEQ ID NO: 17529 - DNA, 31 bp, Artificial Sequence
  Description of Artificial Sequence:  Enzymatic Nucleic Acid
ggggctaaggctagctacaacgagggcttgt

SEQ ID NO: 17530 - DNA, 31 bp, Artificial Sequence
  Description of Artificial Sequence:  Enzymatic Nucleic Acid
ccctggggggctagctacaacgataacgggc

SEQ ID NO: 17531 - DNA, 31 bp, Artificial Sequence
  Description of Artificial Sequence:  Enzymatic Nucleic Acid
gccagtgaggctagctacaacgacccctggg

SEQ ID NO: 17532 - DNA, 31 bp, Artificial Sequence
  Description of Artificial Sequence:  Enzymatic Nucleic Acid
ccagccagggctagctacaacgagatcccct

SEQ ID NO: 17533 - DNA, 31 bp, Artificial Sequence
  Description of Artificial Sequence:  Enzymatic Nucleic Acid
caggccagggctagctacaacgacagtgatc

SEQ ID NO: 17534 - DNA, 31 bp, Artificial Sequence
  Description of Artificial Sequence:  Enzymatic Nucleic Acid
tgctcaggggctagctacaacgacagccagt

SEQ ID NO: 17535 - DNA, 31 bp, Artificial Sequence
  Description of Artificial Sequence:  Enzymatic Nucleic Acid
agatgttgggctagctacaacgatcaggcca

SEQ ID NO: 17536 - DNA, 31 bp, Artificial Sequence
  Description of Artificial Sequence:  Enzymatic Nucleic Acid
ccgagatgggctagctacaacgatgctcagg

SEQ ID NO: 17537 - DNA, 31 bp, Artificial Sequence
  Description of Artificial Sequence:  Enzymatic Nucleic Acid
tcccgagaggctagctacaacgagttgctca

SEQ ID NO: 17538 - DNA, 31 bp, Artificial Sequence
  Description of Artificial Sequence:  Enzymatic Nucleic Acid
ctagaggaggctagctacaacgatcccgaga

SEQ ID NO: 17539 - DNA, 31 bp, Artificial Sequence
  Description of Artificial Sequence:  Enzymatic Nucleic Acid
taggcctgggctagctacaacgatagaggac

SEQ ID NO: 17540 - DNA, 31 bp, Artificial Sequence
  Description of Artificial Sequence:  Enzymatic Nucleic Acid
gtcttaggggctagctacaacgactgctaga

SEQ ID NO: 17541 - DNA, 31 bp, Artificial Sequence
  Description of Artificial Sequence:  Enzymatic Nucleic Acid
ctcacatgggctagctacaacgacttaggcc

SEQ ID NO: 17542 - DNA, 31 bp, Artificial Sequence
  Description of Artificial Sequence:  Enzymatic Nucleic Acid
tcctcacaggctagctacaacgagtcttagg

SEQ ID NO: 17543 - DNA, 31 bp, Artificial Sequence
  Description of Artificial Sequence:  Enzymatic Nucleic Acid
cctcctcaggctagctacaacgaatgtctta

SEQ ID NO: 17544 - DNA, 31 bp, Artificial Sequence
  Description of Artificial Sequence:  Enzymatic Nucleic Acid
gctttttgggctagctacaacgatttttttc

SEQ ID NO: 17545 - DNA, 31 bp, Artificial Sequence
  Description of Artificial Sequence:  Enzymatic Nucleic Acid
ctcccttgggctagctacaacgatttttgct

SEQ ID NO: 17546 - DNA, 31 bp, Artificial Sequence
  Description of Artificial Sequence:  Enzymatic Nucleic Acid
tctcccggggctagctacaacgattctcttt

SEQ ID NO: 17547 - DNA, 31 bp, Artificial Sequence
  Description of Artificial Sequence:  Enzymatic Nucleic Acid
ttctcatgggctagctacaacgacttctccc

SEQ ID NO: 17548 - DNA, 31 bp, Artificial Sequence
  Description of Artificial Sequence:  Enzymatic Nucleic Acid
ctttctcaggctagctacaacgagccttctc

SEQ ID NO: 17549 - DNA, 31 bp, Artificial Sequence
  Description of Artificial Sequence:  Enzymatic Nucleic Acid
gtctcaaaggctagctacaacgatctttctc

SEQ ID NO: 17550 - DNA, 31 bp, Artificial Sequence
  Description of Artificial Sequence:  Enzymatic Nucleic Acid
atggtgcgggctagctacaacgactcaaatt

SEQ ID NO: 17551 - DNA, 31 bp, Artificial Sequence
  Description of Artificial Sequence:  Enzymatic Nucleic Acid
acatggtgggctagctacaacgagtctcaaa

SEQ ID NO: 17552 - DNA, 31 bp, Artificial Sequence
  Description of Artificial Sequence:  Enzymatic Nucleic Acid
ccacatggggctagctacaacgagcgtctca

SEQ ID NO: 17553 - DNA, 31 bp, Artificial Sequence
  Description of Artificial Sequence:  Enzymatic Nucleic Acid
tgcccacaggctagctacaacgaggtgcgtc

SEQ ID NO: 17554 - DNA, 31 bp, Artificial Sequence
  Description of Artificial Sequence:  Enzymatic Nucleic Acid
cgtgcccaggctagctacaacgaatggtgcg

SEQ ID NO: 17555 - DNA, 31 bp, Artificial Sequence
  Description of Artificial Sequence:  Enzymatic Nucleic Acid
cctccgtgggctagctacaacgaccacatgg

SEQ ID NO: 17556 - DNA, 31 bp, Artificial Sequence
  Description of Artificial Sequence:  Enzymatic Nucleic Acid
cccctccgggctagctacaacgagcccacat

SEQ ID NO: 17557 - DNA, 31 bp, Artificial Sequence
  Description of Artificial Sequence:  Enzymatic Nucleic Acid
gagccccgggctagctacaacgaccccctcc

SEQ ID NO: 17558 - DNA, 31 bp, Artificial Sequence
  Description of Artificial Sequence:  Enzymatic Nucleic Acid
ttgctgagggctagctacaacgacccgtccc

SEQ ID NO: 17559 - DNA, 31 bp, Artificial Sequence
  Description of Artificial Sequence:  Enzymatic Nucleic Acid
tggcattgggctagctacaacgatgagcccc

SEQ ID NO: 17560 - DNA, 31 bp, Artificial Sequence
  Description of Artificial Sequence:  Enzymatic Nucleic Acid
aaatggcaggctagctacaacgatgctgagc

SEQ ID NO: 17561 - DNA, 31 bp, Artificial Sequence
  Description of Artificial Sequence:  Enzymatic Nucleic Acid
tgaaatggggctagctacaacgaattgctga

SEQ ID NO: 17562 - DNA, 31 bp, Artificial Sequence
  Description of Artificial Sequence:  Enzymatic Nucleic Acid
cactgaaaggctagctacaacgaggcattgc

SEQ ID NO: 17563 - DNA, 31 bp, Artificial Sequence
  Description of Artificial Sequence:  Enzymatic Nucleic Acid
ggaagccaggctagctacaacgatgaaatgg

SEQ ID NO: 17564 - DNA, 31 bp, Artificial Sequence
  Description of Artificial Sequence:  Enzymatic Nucleic Acid
ctgggaagggctagctacaacgacactgaaa

SEQ ID NO: 17565 - DNA, 31 bp, Artificial Sequence
  Description of Artificial Sequence:  Enzymatic Nucleic Acid
ggtcagagggctagctacaacgatgggaagc

SEQ ID NO: 17566 - DNA, 31 bp, Artificial Sequence
  Description of Artificial Sequence:  Enzymatic Nucleic Acid
tagaagggggctagctacaacgacagagctg

SEQ ID NO: 17567 - DNA, 31 bp, Artificial Sequence
  Description of Artificial Sequence:  Enzymatic Nucleic Acid
ctcaaatgggctagctacaacgaagaagggt

SEQ ID NO: 17568 - DNA, 31 bp, Artificial Sequence
  Description of Artificial Sequence:  Enzymatic Nucleic Acid
ccctcaaaggctagctacaacgagtagaagg

SEQ ID NO: 17569 - DNA, 31 bp, Artificial Sequence
  Description of Artificial Sequence:  Enzymatic Nucleic Acid
tggctgggggctagctacaacgacctcaaat

SEQ ID NO: 17570 - DNA, 31 bp, Artificial Sequence
  Description of Artificial Sequence:  Enzymatic Nucleic Acid
gctcctggggctagctacaacgatgggccct

SEQ ID NO: 17571 - DNA, 31 bp, Artificial Sequence
  Description of Artificial Sequence:  Enzymatic Nucleic Acid
tccatctgggctagctacaacgatcctggct

SEQ ID NO: 17572 - DNA, 31 bp, Artificial Sequence
  Description of Artificial Sequence:  Enzymatic Nucleic Acid
gctgtccaggctagctacaacgactgctcct

SEQ ID NO: 17573 - DNA, 31 bp, Artificial Sequence
  Description of Artificial Sequence:  Enzymatic Nucleic Acid
catcgctgggctagctacaacgaccatctgc

SEQ ID NO: 17574 - DNA, 31 bp, Artificial Sequence
  Description of Artificial Sequence:  Enzymatic Nucleic Acid
cctcatcgggctagctacaacgatgtccatc

SEQ ID NO: 17575 - DNA, 31 bp, Artificial Sequence
  Description of Artificial Sequence:  Enzymatic Nucleic Acid
tcccctcaggctagctacaacgacgctgtcc

SEQ ID NO: 17576 - DNA, 31 bp, Artificial Sequence
  Description of Artificial Sequence:  Enzymatic Nucleic Acid
agaaaatgggctagctacaacgacccctcat

SEQ ID NO: 17577 - DNA, 31 bp, Artificial Sequence
  Description of Artificial Sequence:  Enzymatic Nucleic Acid
ccagaaaaggctagctacaacgagtcccctc

SEQ ID NO: 17578 - DNA, 31 bp, Artificial Sequence
  Description of Artificial Sequence:  Enzymatic Nucleic Acid
tcccagaaggctagctacaacgaccagaaaa

SEQ ID NO: 17579 - DNA, 31 bp, Artificial Sequence
  Description of Artificial Sequence:  Enzymatic Nucleic Acid
ttttcttgggctagctacaacgactcccaga

SEQ ID NO: 17580 - DNA, 31 bp, Artificial Sequence
  Description of Artificial Sequence:  Enzymatic Nucleic Acid
gatatttgggctagctacaacgaccttttct

SEQ ID NO: 17581 - DNA, 31 bp, Artificial Sequence
  Description of Artificial Sequence:  Enzymatic Nucleic Acid
aaaagataggctagctacaacgattgtcctt

SEQ ID NO: 17582 - DNA, 31 bp, Artificial Sequence
  Description of Artificial Sequence:  Enzymatic Nucleic Acid
aaaaaagaggctagctacaacgaatttgtcc

SEQ ID NO: 17583 - DNA, 31 bp, Artificial Sequence
  Description of Artificial Sequence:  Enzymatic Nucleic Acid
tgctttagggctagctacaacgatccaaaaa

SEQ ID NO: 17584 - DNA, 31 bp, Artificial Sequence
  Description of Artificial Sequence:  Enzymatic Nucleic Acid
aaaatttgggctagctacaacgatttagttc

SEQ ID NO: 17585 - DNA, 31 bp, Artificial Sequence
  Description of Artificial Sequence:  Enzymatic Nucleic Acid
gtctaaaaggctagctacaacgattgcttta

SEQ ID NO: 17586 - DNA, 31 bp, Artificial Sequence
  Description of Artificial Sequence:  Enzymatic Nucleic Acid
ggtaaaggggctagctacaacgactaaaatt

SEQ ID NO: 17587 - DNA, 31 bp, Artificial Sequence
  Description of Artificial Sequence:  Enzymatic Nucleic Acid
tccataggggctagctacaacgaaaaggtct

SEQ ID NO: 17588 - DNA, 31 bp, Artificial Sequence
  Description of Artificial Sequence:  Enzymatic Nucleic Acid
cacttccaggctagctacaacgaaggtaaag

SEQ ID NO: 17589 - DNA, 31 bp, Artificial Sequence
  Description of Artificial Sequence:  Enzymatic Nucleic Acid
tagaaccaggctagctacaacgattccatag

SEQ ID NO: 17590 - DNA, 31 bp, Artificial Sequence
  Description of Artificial Sequence:  Enzymatic Nucleic Acid
acatagaaggctagctacaacgacacttcca

SEQ ID NO: 17591 - DNA, 31 bp, Artificial Sequence
  Description of Artificial Sequence:  Enzymatic Nucleic Acid
aatggacaggctagctacaacgaagaaccac

SEQ ID NO: 17592 - DNA, 31 bp, Artificial Sequence
  Description of Artificial Sequence:  Enzymatic Nucleic Acid
agaatggaggctagctacaacgaatagaacc

SEQ ID NO: 17593 - DNA, 31 bp, Artificial Sequence
  Description of Artificial Sequence:  Enzymatic Nucleic Acid
aatgagaaggctagctacaacgaggacatag

SEQ ID NO: 17594 - DNA, 31 bp, Artificial Sequence
  Description of Artificial Sequence:  Enzymatic Nucleic Acid
gccacgaaggctagctacaacgagagaatgg

SEQ ID NO: 17595 - DNA, 31 bp, Artificial Sequence
  Description of Artificial Sequence:  Enzymatic Nucleic Acid
acatgccaggctagctacaacgagaatgaga

SEQ ID NO: 17596 - DNA, 31 bp, Artificial Sequence
  Description of Artificial Sequence:  Enzymatic Nucleic Acid
aaaacatgggctagctacaacgacacgaatg

SEQ ID NO: 17597 - DNA, 31 bp, Artificial Sequence
  Description of Artificial Sequence:  Enzymatic Nucleic Acid
tcaaaacaggctagctacaacgagccacgaa

SEQ ID NO: 17598 - DNA, 31 bp, Artificial Sequence
  Description of Artificial Sequence:  Enzymatic Nucleic Acid
aatcaaaaggctagctacaacgaatgccacg

SEQ ID NO: 17599 - DNA, 31 bp, Artificial Sequence
  Description of Artificial Sequence:  Enzymatic Nucleic Acid
gctacaaaggctagctacaacgacaaaacat

SEQ ID NO: 17600 - DNA, 31 bp, Artificial Sequence
  Description of Artificial Sequence:  Enzymatic Nucleic Acid
cagtgctaggctagctacaacgaaaatcaaa

SEQ ID NO: 17601 - DNA, 31 bp, Artificial Sequence
  Description of Artificial Sequence:  Enzymatic Nucleic Acid
cctcagtgggctagctacaacgatacaaatc

SEQ ID NO: 17602 - DNA, 31 bp, Artificial Sequence
  Description of Artificial Sequence:  Enzymatic Nucleic Acid
accctcagggctagctacaacgagctacaaa

SEQ ID NO: 17603 - DNA, 31 bp, Artificial Sequence
  Description of Artificial Sequence:  Enzymatic Nucleic Acid
gagtgccaggctagctacaacgacctcagtg

SEQ ID NO: 17604 - DNA, 31 bp, Artificial Sequence
  Description of Artificial Sequence:  Enzymatic Nucleic Acid
gttgagtgggctagctacaacgacaccctca

SEQ ID NO: 17605 - DNA, 31 bp, Artificial Sequence
  Description of Artificial Sequence:  Enzymatic Nucleic Acid
gagttgagggctagctacaacgagccaccct

SEQ ID NO: 17606 - DNA, 31 bp, Artificial Sequence
  Description of Artificial Sequence:  Enzymatic Nucleic Acid
gctcagagggctagctacaacgatgagtgcc

SEQ ID NO: 17607 - DNA, 31 bp, Artificial Sequence
  Description of Artificial Sequence:  Enzymatic Nucleic Acid
agtatgggggctagctacaacgatcagagtt

SEQ ID NO: 17608 - DNA, 31 bp, Artificial Sequence
  Description of Artificial Sequence:  Enzymatic Nucleic Acid
caaaagtaggctagctacaacgagggctcag

SEQ ID NO: 17609 - DNA, 31 bp, Artificial Sequence
  Description of Artificial Sequence:  Enzymatic Nucleic Acid
gccaaaagggctagctacaacgaatgggctc

SEQ ID NO: 17610 - DNA, 31 bp, Artificial Sequence
  Description of Artificial Sequence:  Enzymatic Nucleic Acid
tagaggagggctagctacaacgacaaaagta

SEQ ID NO: 17611 - DNA, 31 bp, Artificial Sequence
  Description of Artificial Sequence:  Enzymatic Nucleic Acid
gcatcttaggctagctacaacgatagaggag

SEQ ID NO: 17612 - DNA, 31 bp, Artificial Sequence
  Description of Artificial Sequence:  Enzymatic Nucleic Acid
tcagtgcaggctagctacaacgacttactag

SEQ ID NO: 17613 - DNA, 31 bp, Artificial Sequence
  Description of Artificial Sequence:  Enzymatic Nucleic Acid
tttcagtgggctagctacaacgaatcttact

SEQ ID NO: 17614 - DNA, 31 bp, Artificial Sequence
  Description of Artificial Sequence:  Enzymatic Nucleic Acid
gttttcagggctagctacaacgagcatctta

SEQ ID NO: 17615 - DNA, 31 bp, Artificial Sequence
  Description of Artificial Sequence:  Enzymatic Nucleic Acid
tggctaagggctagctacaacgatttcagtg

SEQ ID NO: 17616 - DNA, 31 bp, Artificial Sequence
  Description of Artificial Sequence:  Enzymatic Nucleic Acid
aactctggggctagctacaacgataagtttt

SEQ ID NO: 17617 - DNA, 31 bp, Artificial Sequence
  Description of Artificial Sequence:  Enzymatic Nucleic Acid
caacctaaggctagctacaacgatctggcta

SEQ ID NO: 17618 - DNA, 31 bp, Artificial Sequence
  Description of Artificial Sequence:  Enzymatic Nucleic Acid
ggagacaaggctagctacaacgactaactct

SEQ ID NO: 17619 - DNA, 31 bp, Artificial Sequence
  Description of Artificial Sequence:  Enzymatic Nucleic Acid
cctggagaggctagctacaacgaaacctaac

SEQ ID NO: 17620 - DNA, 31 bp, Artificial Sequence
  Description of Artificial Sequence:  Enzymatic Nucleic Acid
catcatggggctagctacaacgactggagac

SEQ ID NO: 17621 - DNA, 31 bp, Artificial Sequence
  Description of Artificial Sequence:  Enzymatic Nucleic Acid
ggccatcaggctagctacaacgaggcctgga

SEQ ID NO: 17622 - DNA, 31 bp, Artificial Sequence
  Description of Artificial Sequence:  Enzymatic Nucleic Acid
taaggccaggctagctacaacgacatggcct

SEQ ID NO: 17623 - DNA, 31 bp, Artificial Sequence
  Description of Artificial Sequence:  Enzymatic Nucleic Acid
gtgtaaggggctagctacaacgacatcatgg

SEQ ID NO: 17624 - DNA, 31 bp, Artificial Sequence
  Description of Artificial Sequence:  Enzymatic Nucleic Acid
tttcagtgggctagctacaacgaaaggccat

SEQ ID NO: 17625 - DNA, 31 bp, Artificial Sequence
  Description of Artificial Sequence:  Enzymatic Nucleic Acid
attttcagggctagctacaacgagtaaggcc

SEQ ID NO: 17626 - DNA, 31 bp, Artificial Sequence
  Description of Artificial Sequence:  Enzymatic Nucleic Acid
atgtgacaggctagctacaacgatttcagtg

SEQ ID NO: 17627 - DNA, 31 bp, Artificial Sequence
  Description of Artificial Sequence:  Enzymatic Nucleic Acid
gaatgtgaggctagctacaacgaattttcag

SEQ ID NO: 17628 - DNA, 31 bp, Artificial Sequence
  Description of Artificial Sequence:  Enzymatic Nucleic Acid
atagaatgggctagctacaacgagacatttt

SEQ ID NO: 17629 - DNA, 31 bp, Artificial Sequence
  Description of Artificial Sequence:  Enzymatic Nucleic Acid
aaatagaaggctagctacaacgagtgacatt

SEQ ID NO: 17630 - DNA, 31 bp, Artificial Sequence
  Description of Artificial Sequence:  Enzymatic Nucleic Acid
acccaaaaggctagctacaacgaagaatgtg

SEQ ID NO: 17631 - DNA, 31 bp, Artificial Sequence
  Description of Artificial Sequence:  Enzymatic Nucleic Acid
tattaataggctagctacaacgaccaaaata

SEQ ID NO: 17632 - DNA, 31 bp, Artificial Sequence
  Description of Artificial Sequence:  Enzymatic Nucleic Acid
tatattaaggctagctacaacgaacccaaaa

SEQ ID NO: 17633 - DNA, 31 bp, Artificial Sequence
  Description of Artificial Sequence:  Enzymatic Nucleic Acid
actatataggctagctacaacgataataccc

SEQ ID NO: 17634 - DNA, 31 bp, Artificial Sequence
  Description of Artificial Sequence:  Enzymatic Nucleic Acid
ggactataggctagctacaacgaattaatac

SEQ ID NO: 17635 - DNA, 31 bp, Artificial Sequence
  Description of Artificial Sequence:  Enzymatic Nucleic Acid
ctggactaggctagctacaacgaatattaat

SEQ ID NO: 17636 - DNA, 31 bp, Artificial Sequence
  Description of Artificial Sequence:  Enzymatic Nucleic Acid
tgtctggaggctagctacaacgatatatatt

SEQ ID NO: 17637 - DNA, 31 bp, Artificial Sequence
  Description of Artificial Sequence:  Enzymatic Nucleic Acid
gttaagtgggctagctacaacgactggacta

SEQ ID NO: 17638 - DNA, 31 bp, Artificial Sequence
  Description of Artificial Sequence:  Enzymatic Nucleic Acid
gagttaagggctagctacaacgagtctggac

SEQ ID NO: 17639 - DNA, 31 bp, Artificial Sequence
  Description of Artificial Sequence:  Enzymatic Nucleic Acid
aaattgagggctagctacaacgataagtgtc

SEQ ID NO: 17640 - DNA, 31 bp, Artificial Sequence
  Description of Artificial Sequence:  Enzymatic Nucleic Acid
ccaagaaaggctagctacaacgatgagttaa

SEQ ID NO: 17641 - DNA, 31 bp, Artificial Sequence
  Description of Artificial Sequence:  Enzymatic Nucleic Acid
gaataataggctagctacaacgacaagaaat

SEQ ID NO: 17642 - DNA, 31 bp, Artificial Sequence
  Description of Artificial Sequence:  Enzymatic Nucleic Acid
cagaataaggctagctacaacgaaccaagaa

SEQ ID NO: 17643 - DNA, 31 bp, Artificial Sequence
  Description of Artificial Sequence:  Enzymatic Nucleic Acid
aaacagaaggctagctacaacgaaataccaa

SEQ ID NO: 17644 - DNA, 31 bp, Artificial Sequence
  Description of Artificial Sequence:  Enzymatic Nucleic Acid
gtgcaaaaggctagctacaacgaagaataat

SEQ ID NO: 17645 - DNA, 31 bp, Artificial Sequence
  Description of Artificial Sequence:  Enzymatic Nucleic Acid
taactgtgggctagctacaacgaaaaacaga

SEQ ID NO: 17646 - DNA, 31 bp, Artificial Sequence
  Description of Artificial Sequence:  Enzymatic Nucleic Acid
actaactgggctagctacaacgagcaaaaca

SEQ ID NO: 17647 - DNA, 31 bp, Artificial Sequence
  Description of Artificial Sequence:  Enzymatic Nucleic Acid
acaactaaggctagctacaacgatgtgcaaa

SEQ ID NO: 17648 - DNA, 31 bp, Artificial Sequence
  Description of Artificial Sequence:  Enzymatic Nucleic Acid
tttcacaaggctagctacaacgataactgtg

SEQ ID NO: 17649 - DNA, 31 bp, Artificial Sequence
  Description of Artificial Sequence:  Enzymatic Nucleic Acid
ttctttcaggctagctacaacgaaactaact

SEQ ID NO: 17650 - DNA, 31 bp, Artificial Sequence
  Description of Artificial Sequence:  Enzymatic Nucleic Acid
cttctcagggctagctacaacgatttctttc

SEQ ID NO: 17651 - DNA, 31 bp, Artificial Sequence
  Description of Artificial Sequence:  Enzymatic Nucleic Acid
cattttcaggctagctacaacgatcttctca

SEQ ID NO: 17652 - DNA, 31 bp, Artificial Sequence
  Description of Artificial Sequence:  Enzymatic Nucleic Acid
ggactgcaggctagctacaacgatttcattc

SEQ ID NO: 17653 - DNA, 31 bp, Artificial Sequence
  Description of Artificial Sequence:  Enzymatic Nucleic Acid
caggactgggctagctacaacgaattttcat

SEQ ID NO: 17654 - DNA, 31 bp, Artificial Sequence
  Description of Artificial Sequence:  Enzymatic Nucleic Acid
cctcaggaggctagctacaacgatgcatttt

SEQ ID NO: 17655 - DNA, 31 bp, Artificial Sequence
  Description of Artificial Sequence:  Enzymatic Nucleic Acid
ggagaaaaggctagctacaacgatctcctca

SEQ ID NO: 17656 - DNA, 31 bp, Artificial Sequence
  Description of Artificial Sequence:  Enzymatic Nucleic Acid
ttttgataggctagctacaacgaggagaaaa

SEQ ID NO: 17657 - DNA, 31 bp, Artificial Sequence
  Description of Artificial Sequence:  Enzymatic Nucleic Acid
cgttttgaggctagctacaacgaatggagaa

SEQ ID NO: 17658 - DNA, 31 bp, Artificial Sequence
  Description of Artificial Sequence:  Enzymatic Nucleic Acid
agccctcgggctagctacaacgatttgatat

SEQ ID NO: 17659 - DNA, 31 bp, Artificial Sequence
  Description of Artificial Sequence:  Enzymatic Nucleic Acid
tccatcagggctagctacaacgacctcgttt

SEQ ID NO: 17660 - DNA, 31 bp, Artificial Sequence
  Description of Artificial Sequence:  Enzymatic Nucleic Acid
ttcctccaggctagctacaacgacagccctc

SEQ ID NO: 17661 - DNA, 31 bp, Artificial Sequence
  Description of Artificial Sequence:  Enzymatic Nucleic Acid
cttattgaggctagctacaacgactttttcc

SEQ ID NO: 17662 - DNA, 31 bp, Artificial Sequence
  Description of Artificial Sequence:  Enzymatic Nucleic Acid
tgaccttaggctagctacaacgatgaccttt

SEQ ID NO: 17663 - DNA, 31 bp, Artificial Sequence
  Description of Artificial Sequence:  Enzymatic Nucleic Acid
tcccttgaggctagctacaacgacttattga

SEQ ID NO: 17664 - DNA, 31 bp, Artificial Sequence
  Description of Artificial Sequence:  Enzymatic Nucleic Acid
agacggggggctagctacaacgacttccctt

SEQ ID NO: 17665 - DNA, 31 bp, Artificial Sequence
  Description of Artificial Sequence:  Enzymatic Nucleic Acid
tatagagaggctagctacaacgaggggtctt

SEQ ID NO: 17666 - DNA, 31 bp, Artificial Sequence
  Description of Artificial Sequence:  Enzymatic Nucleic Acid
ggttggtaggctagctacaacgaagagacgg

SEQ ID NO: 17667 - DNA, 31 bp, Artificial Sequence
  Description of Artificial Sequence:  Enzymatic Nucleic Acid
ttggttggggctagctacaacgaatagagac

SEQ ID NO: 17668 - DNA, 31 bp, Artificial Sequence
  Description of Artificial Sequence:  Enzymatic Nucleic Acid
tggtttggggctagctacaacgatggtatag

SEQ ID NO: 17669 - DNA, 31 bp, Artificial Sequence
  Description of Artificial Sequence:  Enzymatic Nucleic Acid
tgaattggggctagctacaacgattggttgg

SEQ ID NO: 17670 - DNA, 31 bp, Artificial Sequence
  Description of Artificial Sequence:  Enzymatic Nucleic Acid
ttggtgaaggctagctacaacgatggtttgg

SEQ ID NO: 17671 - DNA, 31 bp, Artificial Sequence
  Description of Artificial Sequence:  Enzymatic Nucleic Acid
tgtgttggggctagctacaacgagaattggt

SEQ ID NO: 17672 - DNA, 31 bp, Artificial Sequence
  Description of Artificial Sequence:  Enzymatic Nucleic Acid
caactgtgggctagctacaacgatggtgaat

SEQ ID NO: 17673 - DNA, 31 bp, Artificial Sequence
  Description of Artificial Sequence:  Enzymatic Nucleic Acid
cccaactgggctagctacaacgagttggtga

SEQ ID NO: 17674 - DNA, 31 bp, Artificial Sequence
  Description of Artificial Sequence:  Enzymatic Nucleic Acid
ggtcccaaggctagctacaacgatgtgttgg

SEQ ID NO: 17675 - DNA, 31 bp, Artificial Sequence
  Description of Artificial Sequence:  Enzymatic Nucleic Acid
gttttgggggctagctacaacgacccaactg

SEQ ID NO: 17676 - DNA, 31 bp, Artificial Sequence
  Description of Artificial Sequence:  Enzymatic Nucleic Acid
ttcctgtgggctagctacaacgatttgggtc

SEQ ID NO: 17677 - DNA, 31 bp, Artificial Sequence
  Description of Artificial Sequence:  Enzymatic Nucleic Acid
acttcctgggctagctacaacgagttttggg

SEQ ID NO: 17678 - DNA, 31 bp, Artificial Sequence
  Description of Artificial Sequence:  Enzymatic Nucleic Acid
gtgactgaggctagctacaacgattcctgtg

SEQ ID NO: 17679 - DNA, 31 bp, Artificial Sequence
  Description of Artificial Sequence:  Enzymatic Nucleic Acid
aaacgtgaggctagctacaacgatgacttcc

SEQ ID NO: 17680 - DNA, 31 bp, Artificial Sequence
  Description of Artificial Sequence:  Enzymatic Nucleic Acid
aggaaacgggctagctacaacgagactgact

SEQ ID NO: 17681 - DNA, 31 bp, Artificial Sequence
  Description of Artificial Sequence:  Enzymatic Nucleic Acid
aaaggaaaggctagctacaacgagtgactga

SEQ ID NO: 17682 - DNA, 31 bp, Artificial Sequence
  Description of Artificial Sequence:  Enzymatic Nucleic Acid
ccattaaaggctagctacaacgagaaaagga

SEQ ID NO: 17683 - DNA, 31 bp, Artificial Sequence
  Description of Artificial Sequence:  Enzymatic Nucleic Acid
aatccccaggctagctacaacgataaatgaa

SEQ ID NO: 17684 - DNA, 31 bp, Artificial Sequence
  Description of Artificial Sequence:  Enzymatic Nucleic Acid
tagtggaaggctagctacaacgaccccatta

SEQ ID NO: 17685 - DNA, 31 bp, Artificial Sequence
  Description of Artificial Sequence:  Enzymatic Nucleic Acid
tgagatagggctagctacaacgaggaatccc

SEQ ID NO: 17686 - DNA, 31 bp, Artificial Sequence
  Description of Artificial Sequence:  Enzymatic Nucleic Acid
gtgtgagaggctagctacaacgaagtggaat

SEQ ID NO: 17687 - DNA, 31 bp, Artificial Sequence
  Description of Artificial Sequence:  Enzymatic Nucleic Acid
gattagtgggctagctacaacgagagatagt

SEQ ID NO: 17688 - DNA, 31 bp, Artificial Sequence
  Description of Artificial Sequence:  Enzymatic Nucleic Acid
cagattagggctagctacaacgagtgagata

SEQ ID NO: 17689 - DNA, 31 bp, Artificial Sequence
  Description of Artificial Sequence:  Enzymatic Nucleic Acid
ctttcagaggctagctacaacgatagtgtga

SEQ ID NO: 17690 - DNA, 31 bp, Artificial Sequence
  Description of Artificial Sequence:  Enzymatic Nucleic Acid
cttccacaggctagctacaacgacctttcag

SEQ ID NO: 17691 - DNA, 31 bp, Artificial Sequence
  Description of Artificial Sequence:  Enzymatic Nucleic Acid
ctcttccaggctagctacaacgaatcctttc

SEQ ID NO: 17692 - DNA, 31 bp, Artificial Sequence
  Description of Artificial Sequence:  Enzymatic Nucleic Acid
agctaatgggctagctacaacgatcttccac

SEQ ID NO: 17693 - DNA, 31 bp, Artificial Sequence
  Description of Artificial Sequence:  Enzymatic Nucleic Acid
ccagctaaggctagctacaacgagctcttcc

SEQ ID NO: 17694 - DNA, 31 bp, Artificial Sequence
  Description of Artificial Sequence:  Enzymatic Nucleic Acid
tgcgccagggctagctacaacgataatgctc

SEQ ID NO: 17695 - DNA, 31 bp, Artificial Sequence
  Description of Artificial Sequence:  Enzymatic Nucleic Acid
aatatgcgggctagctacaacgacagctaat

SEQ ID NO: 17696 - DNA, 31 bp, Artificial Sequence
  Description of Artificial Sequence:  Enzymatic Nucleic Acid
ttaatatgggctagctacaacgagccagcta

SEQ ID NO: 17697 - DNA, 31 bp, Artificial Sequence
  Description of Artificial Sequence:  Enzymatic Nucleic Acid
gcttaataggctagctacaacgagcgccagc

SEQ ID NO: 17698 - DNA, 31 bp, Artificial Sequence
  Description of Artificial Sequence:  Enzymatic Nucleic Acid
gtgcttaaggctagctacaacgaatgcgcca

SEQ ID NO: 17699 - DNA, 31 bp, Artificial Sequence
  Description of Artificial Sequence:  Enzymatic Nucleic Acid
ttaaagtgggctagctacaacgattaatatg

SEQ ID NO: 17700 - DNA, 31 bp, Artificial Sequence
  Description of Artificial Sequence:  Enzymatic Nucleic Acid
gcttaaagggctagctacaacgagcttaata

SEQ ID NO: 17701 - DNA, 31 bp, Artificial Sequence
  Description of Artificial Sequence:  Enzymatic Nucleic Acid
tcaaggagggctagctacaacgattaaagtg

SEQ ID NO: 17702 - DNA, 31 bp, Artificial Sequence
  Description of Artificial Sequence:  Enzymatic Nucleic Acid
cctttttaggctagctacaacgatcaaggag

SEQ ID NO: 17703 - DNA, 31 bp, Artificial Sequence
  Description of Artificial Sequence:  Enzymatic Nucleic Acid
acataccaggctagctacaacgactttttac

SEQ ID NO: 17704 - DNA, 31 bp, Artificial Sequence
  Description of Artificial Sequence:  Enzymatic Nucleic Acid
attacataggctagctacaacgacacctttt

SEQ ID NO: 17705 - DNA, 31 bp, Artificial Sequence
  Description of Artificial Sequence:  Enzymatic Nucleic Acid
aaattacaggctagctacaacgaaccacctt

SEQ ID NO: 17706 - DNA, 31 bp, Artificial Sequence
  Description of Artificial Sequence:  Enzymatic Nucleic Acid
ataaattaggctagctacaacgaataccacc

SEQ ID NO: 17707 - DNA, 31 bp, Artificial Sequence
  Description of Artificial Sequence:  Enzymatic Nucleic Acid
tgcataaaggctagctacaacgatacatacc

SEQ ID NO: 17708 - DNA, 31 bp, Artificial Sequence
  Description of Artificial Sequence:  Enzymatic Nucleic Acid
accttgcaggctagctacaacgaaaattaca

SEQ ID NO: 17709 - DNA, 31 bp, Artificial Sequence
  Description of Artificial Sequence:  Enzymatic Nucleic Acid
ataccttgggctagctacaacgaataaatta

SEQ ID NO: 17710 - DNA, 31 bp, Artificial Sequence
  Description of Artificial Sequence:  Enzymatic Nucleic Acid
gagaaataggctagctacaacgacttgcata

SEQ ID NO: 17711 - DNA, 31 bp, Artificial Sequence
  Description of Artificial Sequence:  Enzymatic Nucleic Acid
tggagaaaggctagctacaacgaaccttgca

SEQ ID NO: 17712 - DNA, 31 bp, Artificial Sequence
  Description of Artificial Sequence:  Enzymatic Nucleic Acid
agtcccaaggctagctacaacgatggagaaa

SEQ ID NO: 17713 - DNA, 31 bp, Artificial Sequence
  Description of Artificial Sequence:  Enzymatic Nucleic Acid
atcctgagggctagctacaacgacccaactg

SEQ ID NO: 17714 - DNA, 31 bp, Artificial Sequence
  Description of Artificial Sequence:  Enzymatic Nucleic Acid
aactaataggctagctacaacgacctgagtc

SEQ ID NO: 17715 - DNA, 31 bp, Artificial Sequence
  Description of Artificial Sequence:  Enzymatic Nucleic Acid
ttaactaaggctagctacaacgaatcctgag

SEQ ID NO: 17716 - DNA, 31 bp, Artificial Sequence
  Description of Artificial Sequence:  Enzymatic Nucleic Acid
ctcattaaggctagctacaacgataatatcc

SEQ ID NO: 17717 - DNA, 31 bp, Artificial Sequence
  Description of Artificial Sequence:  Enzymatic Nucleic Acid
atggctcaggctagctacaacgataactaat

SEQ ID NO: 17718 - DNA, 31 bp, Artificial Sequence
  Description of Artificial Sequence:  Enzymatic Nucleic Acid
agtgatggggctagctacaacgatcattaac

SEQ ID NO: 17719 - DNA, 31 bp, Artificial Sequence
  Description of Artificial Sequence:  Enzymatic Nucleic Acid
tctagtgaggctagctacaacgaggctcatt

SEQ ID NO: 17720 - DNA, 31 bp, Artificial Sequence
  Description of Artificial Sequence:  Enzymatic Nucleic Acid
tcttctagggctagctacaacgagatggctc

SEQ ID NO: 17721 - DNA, 31 bp, Artificial Sequence
  Description of Artificial Sequence:  Enzymatic Nucleic Acid
aaaatgggggctagctacaacgattttcttc

SEQ ID NO: 17722 - DNA, 31 bp, Artificial Sequence
  Description of Artificial Sequence:  Enzymatic Nucleic Acid
gttgaaaaggctagctacaacgagggctttt

SEQ ID NO: 17723 - DNA, 31 bp, Artificial Sequence
  Description of Artificial Sequence:  Enzymatic Nucleic Acid
caaagcagggctagctacaacgatgaaaatg

SEQ ID NO: 17724 - DNA, 31 bp, Artificial Sequence
  Description of Artificial Sequence:  Enzymatic Nucleic Acid
tttcaaagggctagctacaacgaagttgaaa

SEQ ID NO: 17725 - DNA, 31 bp, Artificial Sequence
  Description of Artificial Sequence:  Enzymatic Nucleic Acid
caggcaagggctagctacaacgattcaaagc

SEQ ID NO: 17726 - DNA, 31 bp, Artificial Sequence
  Description of Artificial Sequence:  Enzymatic Nucleic Acid
accccaggggctagctacaacgaaagtttca

SEQ ID NO: 17727 - DNA, 31 bp, Artificial Sequence
  Description of Artificial Sequence:  Enzymatic Nucleic Acid
tgctcagaggctagctacaacgacccaggca

SEQ ID NO: 17728 - DNA, 31 bp, Artificial Sequence
  Description of Artificial Sequence:  Enzymatic Nucleic Acid
ccatcatgggctagctacaacgatcagaccc

SEQ ID NO: 17729 - DNA, 31 bp, Artificial Sequence
  Description of Artificial Sequence:  Enzymatic Nucleic Acid
tcccatcaggctagctacaacgagctcagac

SEQ ID NO: 17730 - DNA, 31 bp, Artificial Sequence
  Description of Artificial Sequence:  Enzymatic Nucleic Acid
tattcccaggctagctacaacgacatgctca

SEQ ID NO: 17731 - DNA, 31 bp, Artificial Sequence
  Description of Artificial Sequence:  Enzymatic Nucleic Acid
tctccctaggctagctacaacgatcccatca

SEQ ID NO: 17732 - DNA, 31 bp, Artificial Sequence
  Description of Artificial Sequence:  Enzymatic Nucleic Acid
ctaccctgggctagctacaacgactccctat

SEQ ID NO: 17733 - DNA, 31 bp, Artificial Sequence
  Description of Artificial Sequence:  Enzymatic Nucleic Acid
ctttcctaggctagctacaacgacctgtctc

SEQ ID NO: 17734 - DNA, 31 bp, Artificial Sequence
  Description of Artificial Sequence:  Enzymatic Nucleic Acid
agtaggcgggctagctacaacgacctttcct

SEQ ID NO: 17735 - DNA, 31 bp, Artificial Sequence
  Description of Artificial Sequence:  Enzymatic Nucleic Acid
agagtaggggctagctacaacgagccctttc

SEQ ID NO: 17736 - DNA, 31 bp, Artificial Sequence
  Description of Artificial Sequence:  Enzymatic Nucleic Acid
ctgaagagggctagctacaacgaaggcgccc

SEQ ID NO: 17737 - DNA, 31 bp, Artificial Sequence
  Description of Artificial Sequence:  Enzymatic Nucleic Acid
tctttagaggctagctacaacgacctgaaga

SEQ ID NO: 17738 - DNA, 31 bp, Artificial Sequence
  Description of Artificial Sequence:  Enzymatic Nucleic Acid
ccacttgaggctagctacaacgactttagac

SEQ ID NO: 17739 - DNA, 31 bp, Artificial Sequence
  Description of Artificial Sequence:  Enzymatic Nucleic Acid
aaggcccaggctagctacaacgattgatctt

SEQ ID NO: 17740 - DNA, 31 bp, Artificial Sequence
  Description of Artificial Sequence:  Enzymatic Nucleic Acid
atccaaggggctagctacaacgaccacttga

SEQ ID NO: 17741 - DNA, 31 bp, Artificial Sequence
  Description of Artificial Sequence:  Enzymatic Nucleic Acid
cttagcgaggctagctacaacgaccaaggcc

SEQ ID NO: 17742 - DNA, 31 bp, Artificial Sequence
  Description of Artificial Sequence:  Enzymatic Nucleic Acid
cagcttagggctagctacaacgagatccaag

SEQ ID NO: 17743 - DNA, 31 bp, Artificial Sequence
  Description of Artificial Sequence:  Enzymatic Nucleic Acid
agagccagggctagctacaacgattagcgat

SEQ ID NO: 17744 - DNA, 31 bp, Artificial Sequence
  Description of Artificial Sequence:  Enzymatic Nucleic Acid
aaacagagggctagctacaacgacagcttag

SEQ ID NO: 17745 - DNA, 31 bp, Artificial Sequence
  Description of Artificial Sequence:  Enzymatic Nucleic Acid
gcatcaaaggctagctacaacgaagagccag

SEQ ID NO: 17746 - DNA, 31 bp, Artificial Sequence
  Description of Artificial Sequence:  Enzymatic Nucleic Acid
aaatagcaggctagctacaacgacaaacaga

SEQ ID NO: 17747 - DNA, 31 bp, Artificial Sequence
  Description of Artificial Sequence:  Enzymatic Nucleic Acid
ataaatagggctagctacaacgaatcaaaca

SEQ ID NO: 17748 - DNA, 31 bp, Artificial Sequence
  Description of Artificial Sequence:  Enzymatic Nucleic Acid
tgcataaaggctagctacaacgaagcatcaa

SEQ ID NO: 17749 - DNA, 31 bp, Artificial Sequence
  Description of Artificial Sequence:  Enzymatic Nucleic Acid
aacttgcaggctagctacaacgaaaatagca

SEQ ID NO: 17750 - DNA, 31 bp, Artificial Sequence
  Description of Artificial Sequence:  Enzymatic Nucleic Acid
ctaacttgggctagctacaacgaataaatag

SEQ ID NO: 17751 - DNA, 31 bp, Artificial Sequence
  Description of Artificial Sequence:  Enzymatic Nucleic Acid
gaccctaaggctagctacaacgattgcataa

SEQ ID NO: 17752 - DNA, 31 bp, Artificial Sequence
  Description of Artificial Sequence:  Enzymatic Nucleic Acid
tacatagaggctagctacaacgacctaactt

SEQ ID NO: 17753 - DNA, 31 bp, Artificial Sequence
  Description of Artificial Sequence:  Enzymatic Nucleic Acid
taaatacaggctagctacaacgaagacccta

SEQ ID NO: 17754 - DNA, 31 bp, Artificial Sequence
  Description of Artificial Sequence:  Enzymatic Nucleic Acid
cctaaataggctagctacaacgaatagaccc

SEQ ID NO: 17755 - DNA, 31 bp, Artificial Sequence
  Description of Artificial Sequence:  Enzymatic Nucleic Acid
atcctaaaggctagctacaacgaacatagac

SEQ ID NO: 17756 - DNA, 31 bp, Artificial Sequence
  Description of Artificial Sequence:  Enzymatic Nucleic Acid
taggcgcaggctagctacaacgacctaaata

SEQ ID NO: 17757 - DNA, 31 bp, Artificial Sequence
  Description of Artificial Sequence:  Enzymatic Nucleic Acid
agtaggcgggctagctacaacgaatcctaaa

SEQ ID NO: 17758 - DNA, 31 bp, Artificial Sequence
  Description of Artificial Sequence:  Enzymatic Nucleic Acid
agagtaggggctagctacaacgagcatccta

SEQ ID NO: 17759 - DNA, 31 bp, Artificial Sequence
  Description of Artificial Sequence:  Enzymatic Nucleic Acid
ctgaagagggctagctacaacgaaggcgcat

SEQ ID NO: 17760 - DNA, 31 bp, Artificial Sequence
  Description of Artificial Sequence:  Enzymatic Nucleic Acid
tgcagacaggctagctacaacgacctaaata

SEQ ID NO: 17761 - DNA, 31 bp, Artificial Sequence
  Description of Artificial Sequence:  Enzymatic Nucleic Acid
ggtgcagaggctagctacaacgaatcctaaa

SEQ ID NO: 17762 - DNA, 31 bp, Artificial Sequence
  Description of Artificial Sequence:  Enzymatic Nucleic Acid
agaaggtgggctagctacaacgaagacatcc

SEQ ID NO: 17763 - DNA, 31 bp, Artificial Sequence
  Description of Artificial Sequence:  Enzymatic Nucleic Acid
gcagaaggggctagctacaacgagcagacat

SEQ ID NO: 17764 - DNA, 31 bp, Artificial Sequence
  Description of Artificial Sequence:  Enzymatic Nucleic Acid
actggctgggctagctacaacgaagaaggtg

SEQ ID NO: 17765 - DNA, 31 bp, Artificial Sequence
  Description of Artificial Sequence:  Enzymatic Nucleic Acid
ctgactggggctagctacaacgatgcagaag

SEQ ID NO: 17766 - DNA, 31 bp, Artificial Sequence
  Description of Artificial Sequence:  Enzymatic Nucleic Acid
gcttctgaggctagctacaacgatggctgca

SEQ ID NO: 17767 - DNA, 31 bp, Artificial Sequence
  Description of Artificial Sequence:  Enzymatic Nucleic Acid
ctctccagggctagctacaacgattctgact

SEQ ID NO: 17768 - DNA, 31 bp, Artificial Sequence
  Description of Artificial Sequence:  Enzymatic Nucleic Acid
cactgttgggctagctacaacgactctccag

SEQ ID NO: 17769 - DNA, 31 bp, Artificial Sequence
  Description of Artificial Sequence:  Enzymatic Nucleic Acid
atccactgggctagctacaacgatgcctctc

SEQ ID NO: 17770 - DNA, 31 bp, Artificial Sequence
  Description of Artificial Sequence:  Enzymatic Nucleic Acid
gcaatccaggctagctacaacgatgttgcct

SEQ ID NO: 17771 - DNA, 31 bp, Artificial Sequence
  Description of Artificial Sequence:  Enzymatic Nucleic Acid
agcagcaaggctagctacaacgaccactgtt

SEQ ID NO: 17772 - DNA, 31 bp, Artificial Sequence
  Description of Artificial Sequence:  Enzymatic Nucleic Acid
agaagcagggctagctacaacgaaatccact

SEQ ID NO: 17773 - DNA, 31 bp, Artificial Sequence
  Description of Artificial Sequence:  Enzymatic Nucleic Acid
ccaagaagggctagctacaacgaagcaatcc

SEQ ID NO: 17774 - DNA, 31 bp, Artificial Sequence
  Description of Artificial Sequence:  Enzymatic Nucleic Acid
gaagcataggctagctacaacgatcttctcc

SEQ ID NO: 17775 - DNA, 31 bp, Artificial Sequence
  Description of Artificial Sequence:  Enzymatic Nucleic Acid
aggaagcaggctagctacaacgaactcttct

SEQ ID NO: 17776 - DNA, 31 bp, Artificial Sequence
  Description of Artificial Sequence:  Enzymatic Nucleic Acid
aaaggaagggctagctacaacgaatactctt

SEQ ID NO: 17777 - DNA, 31 bp, Artificial Sequence
  Description of Artificial Sequence:  Enzymatic Nucleic Acid
tacatggaggctagctacaacgaaaaaggaa

SEQ ID NO: 17778 - DNA, 31 bp, Artificial Sequence
  Description of Artificial Sequence:  Enzymatic Nucleic Acid
aaattacaggctagctacaacgaggataaaa

SEQ ID NO: 17779 - DNA, 31 bp, Artificial Sequence
  Description of Artificial Sequence:  Enzymatic Nucleic Acid
ttaaattaggctagctacaacgaatggataa

SEQ ID NO: 17780 - DNA, 31 bp, Artificial Sequence
  Description of Artificial Sequence:  Enzymatic Nucleic Acid
cagttaaaggctagctacaacgatacatgga

SEQ ID NO: 17781 - DNA, 31 bp, Artificial Sequence
  Description of Artificial Sequence:  Enzymatic Nucleic Acid
ttctacagggctagctacaacgataaattac

SEQ ID NO: 17782 - DNA, 31 bp, Artificial Sequence
  Description of Artificial Sequence:  Enzymatic Nucleic Acid
aggttctaggctagctacaacgaagttaaat

SEQ ID NO: 17783 - DNA, 31 bp, Artificial Sequence
  Description of Artificial Sequence:  Enzymatic Nucleic Acid
agctcaggggctagctacaacgatctacagt

SEQ ID NO: 17784 - DNA, 31 bp, Artificial Sequence
  Description of Artificial Sequence:  Enzymatic Nucleic Acid
acttagagggctagctacaacgatcaggttc

SEQ ID NO: 17785 - DNA, 31 bp, Artificial Sequence
  Description of Artificial Sequence:  Enzymatic Nucleic Acid
ttcggttaggctagctacaacgattagagct

SEQ ID NO: 17786 - DNA, 31 bp, Artificial Sequence
  Description of Artificial Sequence:  Enzymatic Nucleic Acid
ttcttcggggctagctacaacgatacttaga

SEQ ID NO: 17787 - DNA, 31 bp, Artificial Sequence
  Description of Artificial Sequence:  Enzymatic Nucleic Acid
ggcatacaggctagctacaacgatcttcggt

SEQ ID NO: 17788 - DNA, 31 bp, Artificial Sequence
  Description of Artificial Sequence:  Enzymatic Nucleic Acid
gaggcataggctagctacaacgaattcttcg

SEQ ID NO: 17789 - DNA, 31 bp, Artificial Sequence
  Description of Artificial Sequence:  Enzymatic Nucleic Acid
cagaggcaggctagctacaacgaacattctt

SEQ ID NO: 17790 - DNA, 31 bp, Artificial Sequence
  Description of Artificial Sequence:  Enzymatic Nucleic Acid
aacagaggggctagctacaacgaatacattc

SEQ ID NO: 17791 - DNA, 31 bp, Artificial Sequence
  Description of Artificial Sequence:  Enzymatic Nucleic Acid
cataagaaggctagctacaacgaagaggcat

SEQ ID NO: 17792 - DNA, 31 bp, Artificial Sequence
  Description of Artificial Sequence:  Enzymatic Nucleic Acid
gtggcacaggctagctacaacgaaagaacag

SEQ ID NO: 17793 - DNA, 31 bp, Artificial Sequence
  Description of Artificial Sequence:  Enzymatic Nucleic Acid
atgtggcaggctagctacaacgaataagaac

SEQ ID NO: 17794 - DNA, 31 bp, Artificial Sequence
  Description of Artificial Sequence:  Enzymatic Nucleic Acid
ggatgtggggctagctacaacgaacataaga

SEQ ID NO: 17795 - DNA, 31 bp, Artificial Sequence
  Description of Artificial Sequence:  Enzymatic Nucleic Acid
caaggatgggctagctacaacgaggcacata

SEQ ID NO: 17796 - DNA, 31 bp, Artificial Sequence
  Description of Artificial Sequence:  Enzymatic Nucleic Acid
aacaaggaggctagctacaacgagtggcaca

SEQ ID NO: 17797 - DNA, 31 bp, Artificial Sequence
  Description of Artificial Sequence:  Enzymatic Nucleic Acid
cctttaaaggctagctacaacgaaaggatgt

SEQ ID NO: 17798 - DNA, 31 bp, Artificial Sequence
  Description of Artificial Sequence:  Enzymatic Nucleic Acid
acagagagggctagctacaacgactttaaac

SEQ ID NO: 17799 - DNA, 31 bp, Artificial Sequence
  Description of Artificial Sequence:  Enzymatic Nucleic Acid
tcttcataggctagctacaacgaagagagcc

SEQ ID NO: 17800 - DNA, 31 bp, Artificial Sequence
  Description of Artificial Sequence:  Enzymatic Nucleic Acid
tctcttcaggctagctacaacgaacagagag

SEQ ID NO: 17801 - DNA, 31 bp, Artificial Sequence
  Description of Artificial Sequence:  Enzymatic Nucleic Acid
cggtcccaggctagctacaacgactcttcat

SEQ ID NO: 17802 - DNA, 31 bp, Artificial Sequence
  Description of Artificial Sequence:  Enzymatic Nucleic Acid
gatgacggggctagctacaacgacccatctc

SEQ ID NO: 17803 - DNA, 31 bp, Artificial Sequence
  Description of Artificial Sequence:  Enzymatic Nucleic Acid
gctgatgaggctagctacaacgaggtcccat

SEQ ID NO: 17804 - DNA, 31 bp, Artificial Sequence
  Description of Artificial Sequence:  Enzymatic Nucleic Acid
tgtgctgaggctagctacaacgagacggtcc

SEQ ID NO: 17805 - DNA, 31 bp, Artificial Sequence
  Description of Artificial Sequence:  Enzymatic Nucleic Acid
ggaatgtgggctagctacaacgatgatgacg

SEQ ID NO: 17806 - DNA, 31 bp, Artificial Sequence
  Description of Artificial Sequence:  Enzymatic Nucleic Acid
agggaatgggctagctacaacgagctgatga

SEQ ID NO: 17807 - DNA, 31 bp, Artificial Sequence
  Description of Artificial Sequence:  Enzymatic Nucleic Acid
ctagggaaggctagctacaacgagtgctgat

SEQ ID NO: 17808 - DNA, 31 bp, Artificial Sequence
  Description of Artificial Sequence:  Enzymatic Nucleic Acid
taggctcaggctagctacaacgatagggaat

SEQ ID NO: 17809 - DNA, 31 bp, Artificial Sequence
  Description of Artificial Sequence:  Enzymatic Nucleic Acid
ccagtaggggctagctacaacgatcactagg

SEQ ID NO: 17810 - DNA, 31 bp, Artificial Sequence
  Description of Artificial Sequence:  Enzymatic Nucleic Acid
ggagccagggctagctacaacgaaggctcac

SEQ ID NO: 17811 - DNA, 31 bp, Artificial Sequence
  Description of Artificial Sequence:  Enzymatic Nucleic Acid
gccaggagggctagctacaacgacagtaggc

SEQ ID NO: 17812 - DNA, 31 bp, Artificial Sequence
  Description of Artificial Sequence:  Enzymatic Nucleic Acid
agccgctgggctagctacaacgacaggagcc

SEQ ID NO: 17813 - DNA, 31 bp, Artificial Sequence
  Description of Artificial Sequence:  Enzymatic Nucleic Acid
aaaagccgggctagctacaacgatgccagga

SEQ ID NO: 17814 - DNA, 31 bp, Artificial Sequence
  Description of Artificial Sequence:  Enzymatic Nucleic Acid
cacaaaagggctagctacaacgacgctgcca

SEQ ID NO: 17815 - DNA, 31 bp, Artificial Sequence
  Description of Artificial Sequence:  Enzymatic Nucleic Acid
gtcttccaggctagctacaacgaaaaagccg

SEQ ID NO: 17816 - DNA, 31 bp, Artificial Sequence
  Description of Artificial Sequence:  Enzymatic Nucleic Acid
ctagtgagggctagctacaacgacttccaca

SEQ ID NO: 17817 - DNA, 31 bp, Artificial Sequence
  Description of Artificial Sequence:  Enzymatic Nucleic Acid
ctggctagggctagctacaacgagagtcttc

SEQ ID NO: 17818 - DNA, 31 bp, Artificial Sequence
  Description of Artificial Sequence:  Enzymatic Nucleic Acid
tcttctggggctagctacaacgatagtgagt

SEQ ID NO: 17819 - DNA, 31 bp, Artificial Sequence
  Description of Artificial Sequence:  Enzymatic Nucleic Acid
ctgtcccaggctagctacaacgatcctctct

SEQ ID NO: 17820 - DNA, 31 bp, Artificial Sequence
  Description of Artificial Sequence:  Enzymatic Nucleic Acid
gaggactgggctagctacaacgacccactcc

SEQ ID NO: 17821 - DNA, 31 bp, Artificial Sequence
  Description of Artificial Sequence:  Enzymatic Nucleic Acid
ggagaggaggctagctacaacgatgtcccac

SEQ ID NO: 17822 - DNA, 31 bp, Artificial Sequence
  Description of Artificial Sequence:  Enzymatic Nucleic Acid
gatcttggggctagctacaacgaggagagga

SEQ ID NO: 17823 - DNA, 31 bp, Artificial Sequence
  Description of Artificial Sequence:  Enzymatic Nucleic Acid
gatttagaggctagctacaacgacttggtgg

SEQ ID NO: 17824 - DNA, 31 bp, Artificial Sequence
  Description of Artificial Sequence:  Enzymatic Nucleic Acid
tgtttggaggctagctacaacgattagatct

SEQ ID NO: 17825 - DNA, 31 bp, Artificial Sequence
  Description of Artificial Sequence:  Enzymatic Nucleic Acid
tgcttttgggctagctacaacgattggattt

SEQ ID NO: 17826 - DNA, 31 bp, Artificial Sequence
  Description of Artificial Sequence:  Enzymatic Nucleic Acid
ctagcctgggctagctacaacgattttgttt

SEQ ID NO: 17827 - DNA, 31 bp, Artificial Sequence
  Description of Artificial Sequence:  Enzymatic Nucleic Acid
ggctctagggctagctacaacgactgctttt

SEQ ID NO: 17828 - DNA, 31 bp, Artificial Sequence
  Description of Artificial Sequence:  Enzymatic Nucleic Acid
tcttctggggctagctacaacgatctagcct

SEQ ID NO: 17829 - DNA, 31 bp, Artificial Sequence
  Description of Artificial Sequence:  Enzymatic Nucleic Acid
aagatttgggctagctacaacgacctctctt

SEQ ID NO: 17830 - DNA, 31 bp, Artificial Sequence
  Description of Artificial Sequence:  Enzymatic Nucleic Acid
aacaaagaggctagctacaacgattgtcctc

SEQ ID NO: 17831 - DNA, 31 bp, Artificial Sequence
  Description of Artificial Sequence:  Enzymatic Nucleic Acid
aggaacaaggctagctacaacgaaaagattt

SEQ ID NO: 17832 - DNA, 31 bp, Artificial Sequence
  Description of Artificial Sequence:  Enzymatic Nucleic Acid
aagaggaaggctagctacaacgaaacaaaga

SEQ ID NO: 17833 - DNA, 31 bp, Artificial Sequence
  Description of Artificial Sequence:  Enzymatic Nucleic Acid
cgtatgtgggctagctacaacgaaaagaaga

SEQ ID NO: 17834 - DNA, 31 bp, Artificial Sequence
  Description of Artificial Sequence:  Enzymatic Nucleic Acid
tgcgtatgggctagctacaacgagtaaagaa

SEQ ID NO: 17835 - DNA, 31 bp, Artificial Sequence
  Description of Artificial Sequence:  Enzymatic Nucleic Acid
tttgcgtaggctagctacaacgagtgtaaag

SEQ ID NO: 17836 - DNA, 31 bp, Artificial Sequence
  Description of Artificial Sequence:  Enzymatic Nucleic Acid
ggtttgcgggctagctacaacgaatgtgtaa

SEQ ID NO: 17837 - DNA, 31 bp, Artificial Sequence
  Description of Artificial Sequence:  Enzymatic Nucleic Acid
gtggtttgggctagctacaacgagtatgtgt

SEQ ID NO: 17838 - DNA, 31 bp, Artificial Sequence
  Description of Artificial Sequence:  Enzymatic Nucleic Acid
acaggtggggctagctacaacgattgcgtat

SEQ ID NO: 17839 - DNA, 31 bp, Artificial Sequence
  Description of Artificial Sequence:  Enzymatic Nucleic Acid
gtcacaggggctagctacaacgaggtttgcg

SEQ ID NO: 17840 - DNA, 31 bp, Artificial Sequence
  Description of Artificial Sequence:  Enzymatic Nucleic Acid
agctgtcaggctagctacaacgaaggtggtt

SEQ ID NO: 17841 - DNA, 31 bp, Artificial Sequence
  Description of Artificial Sequence:  Enzymatic Nucleic Acid
gccagctgggctagctacaacgacacaggtg

SEQ ID NO: 17842 - DNA, 31 bp, Artificial Sequence
  Description of Artificial Sequence:  Enzymatic Nucleic Acid
attgccagggctagctacaacgatgtcacag

SEQ ID NO: 17843 - DNA, 31 bp, Artificial Sequence
  Description of Artificial Sequence:  Enzymatic Nucleic Acid
taaaattgggctagctacaacgacagctgtc

SEQ ID NO: 17844 - DNA, 31 bp, Artificial Sequence
  Description of Artificial Sequence:  Enzymatic Nucleic Acid
ttataaaaggctagctacaacgatgccagct

SEQ ID NO: 17845 - DNA, 31 bp, Artificial Sequence
  Description of Artificial Sequence:  Enzymatic Nucleic Acid
ctgatttaggctagctacaacgaaaaattgc

SEQ ID NO: 17846 - DNA, 31 bp, Artificial Sequence
  Description of Artificial Sequence:  Enzymatic Nucleic Acid
ttacctgaggctagctacaacgattataaaa

SEQ ID NO: 17847 - DNA, 31 bp, Artificial Sequence
  Description of Artificial Sequence:  Enzymatic Nucleic Acid
tccagttaggctagctacaacgactgattta

SEQ ID NO: 17848 - DNA, 31 bp, Artificial Sequence
  Description of Artificial Sequence:  Enzymatic Nucleic Acid
ccttccagggctagctacaacgatacctgat

SEQ ID NO: 17849 - DNA, 31 bp, Artificial Sequence
  Description of Artificial Sequence:  Enzymatic Nucleic Acid
gagtttaaggctagctacaacgactccttcc

SEQ ID NO: 17850 - DNA, 31 bp, Artificial Sequence
  Description of Artificial Sequence:  Enzymatic Nucleic Acid
tttctgagggctagctacaacgattaacctc

SEQ ID NO: 17851 - DNA, 31 bp, Artificial Sequence
  Description of Artificial Sequence:  Enzymatic Nucleic Acid
gactgaggggctagctacaacgacttctttt

SEQ ID NO: 17852 - DNA, 31 bp, Artificial Sequence
  Description of Artificial Sequence:  Enzymatic Nucleic Acid
agaattgaggctagctacaacgatgaggtct

SEQ ID NO: 17853 - DNA, 31 bp, Artificial Sequence
  Description of Artificial Sequence:  Enzymatic Nucleic Acid
gtagagaaggctagctacaacgatgactgag

SEQ ID NO: 17854 - DNA, 31 bp, Artificial Sequence
  Description of Artificial Sequence:  Enzymatic Nucleic Acid
aaaaaaagggctagctacaacgaagagaatt

SEQ ID NO: 17855 - DNA, 31 bp, Artificial Sequence
  Description of Artificial Sequence:  Enzymatic Nucleic Acid
ttatctgaggctagctacaacgattggaaaa

SEQ ID NO: 17856 - DNA, 31 bp, Artificial Sequence
  Description of Artificial Sequence:  Enzymatic Nucleic Acid
ggctattaggctagctacaacgactgatttg

SEQ ID NO: 17857 - DNA, 31 bp, Artificial Sequence
  Description of Artificial Sequence:  Enzymatic Nucleic Acid
ctgggctaggctagctacaacgatatctgat

SEQ ID NO: 17858 - DNA, 31 bp, Artificial Sequence
  Description of Artificial Sequence:  Enzymatic Nucleic Acid
ttgctgggggctagctacaacgatattatct

SEQ ID NO: 17859 - DNA, 31 bp, Artificial Sequence
  Description of Artificial Sequence:  Enzymatic Nucleic Acid
actatttgggctagctacaacgatgggctat

SEQ ID NO: 17860 - DNA, 31 bp, Artificial Sequence
  Description of Artificial Sequence:  Enzymatic Nucleic Acid
tatcactaggctagctacaacgattgctggg

SEQ ID NO: 17861 - DNA, 31 bp, Artificial Sequence
  Description of Artificial Sequence:  Enzymatic Nucleic Acid
tgttatcaggctagctacaacgatatttgct

SEQ ID NO: 17862 - DNA, 31 bp, Artificial Sequence
  Description of Artificial Sequence:  Enzymatic Nucleic Acid
atttgttaggctagctacaacgacactattt

SEQ ID NO: 17863 - DNA, 31 bp, Artificial Sequence
  Description of Artificial Sequence:  Enzymatic Nucleic Acid
tttatttgggctagctacaacgatatcacta

SEQ ID NO: 17864 - DNA, 31 bp, Artificial Sequence
  Description of Artificial Sequence:  Enzymatic Nucleic Acid
aggttttaggctagctacaacgattgttatc

SEQ ID NO: 17865 - DNA, 31 bp, Artificial Sequence
  Description of Artificial Sequence:  Enzymatic Nucleic Acid
agctaaggggctagctacaacgatttatttg

SEQ ID NO: 17866 - DNA, 31 bp, Artificial Sequence
  Description of Artificial Sequence:  Enzymatic Nucleic Acid
atgaacagggctagctacaacgataaggttt

SEQ ID NO: 17867 - DNA, 31 bp, Artificial Sequence
  Description of Artificial Sequence:  Enzymatic Nucleic Acid
gacatgaaggctagctacaacgaagctaagg

SEQ ID NO: 17868 - DNA, 31 bp, Artificial Sequence
  Description of Artificial Sequence:  Enzymatic Nucleic Acid
tcaagacaggctagctacaacgagaacagct

SEQ ID NO: 17869 - DNA, 31 bp, Artificial Sequence
  Description of Artificial Sequence:  Enzymatic Nucleic Acid
aatcaagaggctagctacaacgaatgaacag

SEQ ID NO: 17870 - DNA, 31 bp, Artificial Sequence
  Description of Artificial Sequence:  Enzymatic Nucleic Acid
tattgaaaggctagctacaacgacaagacat

SEQ ID NO: 17871 - DNA, 31 bp, Artificial Sequence
  Description of Artificial Sequence:  Enzymatic Nucleic Acid
attaattaggctagctacaacgatgaaatca

SEQ ID NO: 17872 - DNA, 31 bp, Artificial Sequence
  Description of Artificial Sequence:  Enzymatic Nucleic Acid
agaattaaggctagctacaacgatattgaaa

SEQ ID NO: 17873 - DNA, 31 bp, Artificial Sequence
  Description of Artificial Sequence:  Enzymatic Nucleic Acid
attaagaaggctagctacaacgataattatt

SEQ ID NO: 17874 - DNA, 31 bp, Artificial Sequence
  Description of Artificial Sequence:  Enzymatic Nucleic Acid
cttaatgaggctagctacaacgataagaatt

SEQ ID NO: 17875 - DNA, 31 bp, Artificial Sequence
  Description of Artificial Sequence:  Enzymatic Nucleic Acid
tctcttaaggctagctacaacgagattaaga

SEQ ID NO: 17876 - DNA, 31 bp, Artificial Sequence
  Description of Artificial Sequence:  Enzymatic Nucleic Acid
tattatggggctagctacaacgactcttaat

SEQ ID NO: 17877 - DNA, 31 bp, Artificial Sequence
  Description of Artificial Sequence:  Enzymatic Nucleic Acid
atttattaggctagctacaacgaggtctctt

SEQ ID NO: 17878 - DNA, 31 bp, Artificial Sequence
  Description of Artificial Sequence:  Enzymatic Nucleic Acid
agtatttaggctagctacaacgatatggtct

SEQ ID NO: 17879 - DNA, 31 bp, Artificial Sequence
  Description of Artificial Sequence:  Enzymatic Nucleic Acid
aaggagtaggctagctacaacgattattatg

SEQ ID NO: 17880 - DNA, 31 bp, Artificial Sequence
  Description of Artificial Sequence:  Enzymatic Nucleic Acid
aaaaggagggctagctacaacgaatttatta

SEQ ID NO: 17881 - DNA, 31 bp, Artificial Sequence
  Description of Artificial Sequence:  Enzymatic Nucleic Acid
tggttttgggctagctacaacgattttctct

SEQ ID NO: 17882 - DNA, 31 bp, Artificial Sequence
  Description of Artificial Sequence:  Enzymatic Nucleic Acid
tctaatggggctagctacaacgatttgcttt

SEQ ID NO: 17883 - DNA, 31 bp, Artificial Sequence
  Description of Artificial Sequence:  Enzymatic Nucleic Acid
aattctaaggctagctacaacgaggttttgc

SEQ ID NO: 17884 - DNA, 31 bp, Artificial Sequence
  Description of Artificial Sequence:  Enzymatic Nucleic Acid
agtaacaaggctagctacaacgatctaatgg

SEQ ID NO: 17885 - DNA, 31 bp, Artificial Sequence
  Description of Artificial Sequence:  Enzymatic Nucleic Acid
ctgagtaaggctagctacaacgaaattctaa

SEQ ID NO: 17886 - DNA, 31 bp, Artificial Sequence
  Description of Artificial Sequence:  Enzymatic Nucleic Acid
gagctgagggctagctacaacgaaacaattc

SEQ ID NO: 17887 - DNA, 31 bp, Artificial Sequence
  Description of Artificial Sequence:  Enzymatic Nucleic Acid
tgaaggagggctagctacaacgatgagtaac

SEQ ID NO: 17888 - DNA, 31 bp, Artificial Sequence
  Description of Artificial Sequence:  Enzymatic Nucleic Acid
aacctgagggctagctacaacgattgaagga

SEQ ID NO: 17889 - DNA, 31 bp, Artificial Sequence
  Description of Artificial Sequence:  Enzymatic Nucleic Acid
gctacaaaggctagctacaacgactgagttt

SEQ ID NO: 17890 - DNA, 31 bp, Artificial Sequence
  Description of Artificial Sequence:  Enzymatic Nucleic Acid
gtatgctaggctagctacaacgaaaacctga

SEQ ID NO: 17891 - DNA, 31 bp, Artificial Sequence
  Description of Artificial Sequence:  Enzymatic Nucleic Acid
catgtatgggctagctacaacgatacaaacc

SEQ ID NO: 17892 - DNA, 31 bp, Artificial Sequence
  Description of Artificial Sequence:  Enzymatic Nucleic Acid
ctcatgtaggctagctacaacgagctacaaa

SEQ ID NO: 17893 - DNA, 31 bp, Artificial Sequence
  Description of Artificial Sequence:  Enzymatic Nucleic Acid
gactcatgggctagctacaacgaatgctaca

SEQ ID NO: 17894 - DNA, 31 bp, Artificial Sequence
  Description of Artificial Sequence:  Enzymatic Nucleic Acid
tggactcaggctagctacaacgagtatgcta

SEQ ID NO: 17895 - DNA, 31 bp, Artificial Sequence
  Description of Artificial Sequence:  Enzymatic Nucleic Acid
tggatggaggctagctacaacgatcatgtat

SEQ ID NO: 17896 - DNA, 31 bp, Artificial Sequence
  Description of Artificial Sequence:  Enzymatic Nucleic Acid
ctgatggaggctagctacaacgaggactcat

SEQ ID NO: 17897 - DNA, 31 bp, Artificial Sequence
  Description of Artificial Sequence:  Enzymatic Nucleic Acid
ttgactgaggctagctacaacgaggatggac

SEQ ID NO: 17898 - DNA, 31 bp, Artificial Sequence
  Description of Artificial Sequence:  Enzymatic Nucleic Acid
ttctttgaggctagctacaacgatgatggat

SEQ ID NO: 17899 - DNA, 31 bp, Artificial Sequence
  Description of Artificial Sequence:  Enzymatic Nucleic Acid
tggaaccaggctagctacaacgatctttgac

SEQ ID NO: 17900 - DNA, 31 bp, Artificial Sequence
  Description of Artificial Sequence:  Enzymatic Nucleic Acid
agatggaaggctagctacaacgacattcttt

SEQ ID NO: 17901 - DNA, 31 bp, Artificial Sequence
  Description of Artificial Sequence:  Enzymatic Nucleic Acid
actccagaggctagctacaacgaggaaccat

SEQ ID NO: 17902 - DNA, 31 bp, Artificial Sequence
  Description of Artificial Sequence:  Enzymatic Nucleic Acid
cattaagaggctagctacaacgatccagatg

SEQ ID NO: 17903 - DNA, 31 bp, Artificial Sequence
  Description of Artificial Sequence:  Enzymatic Nucleic Acid
tttctacaggctagctacaacgataagactc

SEQ ID NO: 17904 - DNA, 31 bp, Artificial Sequence
  Description of Artificial Sequence:  Enzymatic Nucleic Acid
tctttctaggctagctacaacgaattaagac

SEQ ID NO: 17905 - DNA, 31 bp, Artificial Sequence
  Description of Artificial Sequence:  Enzymatic Nucleic Acid
agtctccaggctagctacaacgattttcttt

SEQ ID NO: 17906 - DNA, 31 bp, Artificial Sequence
  Description of Artificial Sequence:  Enzymatic Nucleic Acid
attacaagggctagctacaacgactccattt

SEQ ID NO: 17907 - DNA, 31 bp, Artificial Sequence
  Description of Artificial Sequence:  Enzymatic Nucleic Acid
cattattaggctagctacaacgaaagtctcc

SEQ ID NO: 17908 - DNA, 31 bp, Artificial Sequence
  Description of Artificial Sequence:  Enzymatic Nucleic Acid
gctcattaggctagctacaacgatacaagtc

SEQ ID NO: 17909 - DNA, 31 bp, Artificial Sequence
  Description of Artificial Sequence:  Enzymatic Nucleic Acid
ctagctcaggctagctacaacgatattacaa

SEQ ID NO: 17910 - DNA, 31 bp, Artificial Sequence
  Description of Artificial Sequence:  Enzymatic Nucleic Acid
gtaactagggctagctacaacgatcattatt

SEQ ID NO: 17911 - DNA, 31 bp, Artificial Sequence
  Description of Artificial Sequence:  Enzymatic Nucleic Acid
ctttgtaaggctagctacaacgatagctcat

SEQ ID NO: 17912 - DNA, 31 bp, Artificial Sequence
  Description of Artificial Sequence:  Enzymatic Nucleic Acid
gcactttgggctagctacaacgaaactagct

SEQ ID NO: 17913 - DNA, 31 bp, Artificial Sequence
  Description of Artificial Sequence:  Enzymatic Nucleic Acid
aacaagcaggctagctacaacgatttgtaac

SEQ ID NO: 17914 - DNA, 31 bp, Artificial Sequence
  Description of Artificial Sequence:  Enzymatic Nucleic Acid
tgaacaagggctagctacaacgaactttgta

SEQ ID NO: 17915 - DNA, 31 bp, Artificial Sequence
  Description of Artificial Sequence:  Enzymatic Nucleic Acid
ttaatgaaggctagctacaacgaaagcactt

SEQ ID NO: 17916 - DNA, 31 bp, Artificial Sequence
  Description of Artificial Sequence:  Enzymatic Nucleic Acid
tattttaaggctagctacaacgagaacaagc

SEQ ID NO: 17917 - DNA, 31 bp, Artificial Sequence
  Description of Artificial Sequence:  Enzymatic Nucleic Acid
cagtgctaggctagctacaacgatttaatga

SEQ ID NO: 17918 - DNA, 31 bp, Artificial Sequence
  Description of Artificial Sequence:  Enzymatic Nucleic Acid
tttcagtgggctagctacaacgatattttaa

SEQ ID NO: 17919 - DNA, 31 bp, Artificial Sequence
  Description of Artificial Sequence:  Enzymatic Nucleic Acid
attttcagggctagctacaacgagctatttt

SEQ ID NO: 17920 - DNA, 31 bp, Artificial Sequence
  Description of Artificial Sequence:  Enzymatic Nucleic Acid
tgtttcaaggctagctacaacgatttcagtg

SEQ ID NO: 17921 - DNA, 31 bp, Artificial Sequence
  Description of Artificial Sequence:  Enzymatic Nucleic Acid
aattcatgggctagctacaacgattcaattt

SEQ ID NO: 17922 - DNA, 31 bp, Artificial Sequence
  Description of Artificial Sequence:  Enzymatic Nucleic Acid
ttaattcaggctagctacaacgagtttcaat

SEQ ID NO: 17923 - DNA, 31 bp, Artificial Sequence
  Description of Artificial Sequence:  Enzymatic Nucleic Acid
tcagttaaggctagctacaacgatcatgttt

SEQ ID NO: 17924 - DNA, 31 bp, Artificial Sequence
  Description of Artificial Sequence:  Enzymatic Nucleic Acid
attatcagggctagctacaacgataattcat

SEQ ID NO: 17925 - DNA, 31 bp, Artificial Sequence
  Description of Artificial Sequence:  Enzymatic Nucleic Acid
gaatattaggctagctacaacgacagttaat

SEQ ID NO: 17926 - DNA, 31 bp, Artificial Sequence
  Description of Artificial Sequence:  Enzymatic Nucleic Acid
ttggaataggctagctacaacgatatcagtt

SEQ ID NO: 17927 - DNA, 31 bp, Artificial Sequence
  Description of Artificial Sequence:  Enzymatic Nucleic Acid
gattggaaggctagctacaacgaattatcag

SEQ ID NO: 17928 - DNA, 31 bp, Artificial Sequence
  Description of Artificial Sequence:  Enzymatic Nucleic Acid
gcaaatgaggctagctacaacgatggaatat

SEQ ID NO: 17929 - DNA, 31 bp, Artificial Sequence
  Description of Artificial Sequence:  Enzymatic Nucleic Acid
atggcaaaggctagctacaacgagattggaa

SEQ ID NO: 17930 - DNA, 31 bp, Artificial Sequence
  Description of Artificial Sequence:  Enzymatic Nucleic Acid
ataaatggggctagctacaacgaaaatgatt

SEQ ID NO: 17931 - DNA, 31 bp, Artificial Sequence
  Description of Artificial Sequence:  Enzymatic Nucleic Acid
gtcataaaggctagctacaacgaggcaaatg

SEQ ID NO: 17932 - DNA, 31 bp, Artificial Sequence
  Description of Artificial Sequence:  Enzymatic Nucleic Acid
ttttgtcaggctagctacaacgaaaatggca

SEQ ID NO: 17933 - DNA, 31 bp, Artificial Sequence
  Description of Artificial Sequence:  Enzymatic Nucleic Acid
catttttgggctagctacaacgacataaatg

SEQ ID NO: 17934 - DNA, 31 bp, Artificial Sequence
  Description of Artificial Sequence:  Enzymatic Nucleic Acid
gccaaccaggctagctacaacgattttgtca

SEQ ID NO: 17935 - DNA, 31 bp, Artificial Sequence
  Description of Artificial Sequence:  Enzymatic Nucleic Acid
agtgccaaggctagctacaacgacatttttg

SEQ ID NO: 17936 - DNA, 31 bp, Artificial Sequence
  Description of Artificial Sequence:  Enzymatic Nucleic Acid
tgttagtgggctagctacaacgacaaccatt

SEQ ID NO: 17937 - DNA, 31 bp, Artificial Sequence
  Description of Artificial Sequence:  Enzymatic Nucleic Acid
tttgttagggctagctacaacgagccaacca

SEQ ID NO: 17938 - DNA, 31 bp, Artificial Sequence
  Description of Artificial Sequence:  Enzymatic Nucleic Acid
gttctttgggctagctacaacgatagtgcca

SEQ ID NO: 17939 - DNA, 31 bp, Artificial Sequence
  Description of Artificial Sequence:  Enzymatic Nucleic Acid
agtgctcgggctagctacaacgatctttgtt

SEQ ID NO: 17940 - DNA, 31 bp, Artificial Sequence
  Description of Artificial Sequence:  Enzymatic Nucleic Acid
aggaagtgggctagctacaacgatcgttctt

SEQ ID NO: 17941 - DNA, 31 bp, Artificial Sequence
  Description of Artificial Sequence:  Enzymatic Nucleic Acid
aaaggaagggctagctacaacgagctcgttc

SEQ ID NO: 17942 - DNA, 31 bp, Artificial Sequence
  Description of Artificial Sequence:  Enzymatic Nucleic Acid
ctcagaaaggctagctacaacgatctgaaag

SEQ ID NO: 17943 - DNA, 31 bp, Artificial Sequence
  Description of Artificial Sequence:  Enzymatic Nucleic Acid
gtacattaggctagctacaacgactcagaaa

SEQ ID NO: 17944 - DNA, 31 bp, Artificial Sequence
  Description of Artificial Sequence:  Enzymatic Nucleic Acid
cacgtacaggctagctacaacgatatctcag

SEQ ID NO: 17945 - DNA, 31 bp, Artificial Sequence
  Description of Artificial Sequence:  Enzymatic Nucleic Acid
tccacgtaggctagctacaacgaattatctc

SEQ ID NO: 17946 - DNA, 31 bp, Artificial Sequence
  Description of Artificial Sequence:  Enzymatic Nucleic Acid
gttccacgggctagctacaacgaacattatc

SEQ ID NO: 17947 - DNA, 31 bp, Artificial Sequence
  Description of Artificial Sequence:  Enzymatic Nucleic Acid
ctgttccaggctagctacaacgagtacatta

SEQ ID NO: 17948 - DNA, 31 bp, Artificial Sequence
  Description of Artificial Sequence:  Enzymatic Nucleic Acid
ccagactgggctagctacaacgatccacgta

SEQ ID NO: 17949 - DNA, 31 bp, Artificial Sequence
  Description of Artificial Sequence:  Enzymatic Nucleic Acid
cacccagaggctagctacaacgatgttccac

SEQ ID NO: 17950 - DNA, 31 bp, Artificial Sequence
  Description of Artificial Sequence:  Enzymatic Nucleic Acid
ccattccaggctagctacaacgaccagactg

SEQ ID NO: 17951 - DNA, 31 bp, Artificial Sequence
  Description of Artificial Sequence:  Enzymatic Nucleic Acid
cagccccaggctagctacaacgatccaccca

SEQ ID NO: 17952 - DNA, 31 bp, Artificial Sequence
  Description of Artificial Sequence:  Enzymatic Nucleic Acid
ggtttcagggctagctacaacgacccattcc

SEQ ID NO: 17953 - DNA, 31 bp, Artificial Sequence
  Description of Artificial Sequence:  Enzymatic Nucleic Acid
gcacatggggctagctacaacgattcagccc

SEQ ID NO: 17954 - DNA, 31 bp, Artificial Sequence
  Description of Artificial Sequence:  Enzymatic Nucleic Acid
cttgcacaggctagctacaacgaggtttcag

SEQ ID NO: 17955 - DNA, 31 bp, Artificial Sequence
  Description of Artificial Sequence:  Enzymatic Nucleic Acid
gacttgcaggctagctacaacgaatggtttc

SEQ ID NO: 17956 - DNA, 31 bp, Artificial Sequence
  Description of Artificial Sequence:  Enzymatic Nucleic Acid
cagacttgggctagctacaacgaacatggtt

SEQ ID NO: 17957 - DNA, 31 bp, Artificial Sequence
  Description of Artificial Sequence:  Enzymatic Nucleic Acid
gacacagaggctagctacaacgattgcacat

SEQ ID NO: 17958 - DNA, 31 bp, Artificial Sequence
  Description of Artificial Sequence:  Enzymatic Nucleic Acid
acaagacaggctagctacaacgaagacttgc

SEQ ID NO: 17959 - DNA, 31 bp, Artificial Sequence
  Description of Artificial Sequence:  Enzymatic Nucleic Acid
tgacaagaggctagctacaacgaacagactt

SEQ ID NO: 17960 - DNA, 31 bp, Artificial Sequence
  Description of Artificial Sequence:  Enzymatic Nucleic Acid
tggactgaggctagctacaacgaaagacaca

SEQ ID NO: 17961 - DNA, 31 bp, Artificial Sequence
  Description of Artificial Sequence:  Enzymatic Nucleic Acid
ttcttggaggctagctacaacgatgacaaga

SEQ ID NO: 17962 - DNA, 31 bp, Artificial Sequence
  Description of Artificial Sequence:  Enzymatic Nucleic Acid
cggtgtcaggctagctacaacgattcttgga

SEQ ID NO: 17963 - DNA, 31 bp, Artificial Sequence
  Description of Artificial Sequence:  Enzymatic Nucleic Acid
tctcggtgggctagctacaacgacacttctt

SEQ ID NO: 17964 - DNA, 31 bp, Artificial Sequence
  Description of Artificial Sequence:  Enzymatic Nucleic Acid
catctcggggctagctacaacgagtcacttc

SEQ ID NO: 17965 - DNA, 31 bp, Artificial Sequence
  Description of Artificial Sequence:  Enzymatic Nucleic Acid
aattaacaggctagctacaacgactcggtgt

SEQ ID NO: 17966 - DNA, 31 bp, Artificial Sequence
  Description of Artificial Sequence:  Enzymatic Nucleic Acid
aaaattaaggctagctacaacgaatctcggt

SEQ ID NO: 17967 - DNA, 31 bp, Artificial Sequence
  Description of Artificial Sequence:  Enzymatic Nucleic Acid
ccctaaaaggctagctacaacgataacatct

SEQ ID NO: 17968 - DNA, 31 bp, Artificial Sequence
  Description of Artificial Sequence:  Enzymatic Nucleic Acid
ggcacgggggctagctacaacgaccctaaaa

SEQ ID NO: 17969 - DNA, 31 bp, Artificial Sequence
  Description of Artificial Sequence:  Enzymatic Nucleic Acid
acaaggcaggctagctacaacgagggtccct

SEQ ID NO: 17970 - DNA, 31 bp, Artificial Sequence
  Description of Artificial Sequence:  Enzymatic Nucleic Acid
aaacaaggggctagctacaacgaacgggtcc

SEQ ID NO: 17971 - DNA, 31 bp, Artificial Sequence
  Description of Artificial Sequence:  Enzymatic Nucleic Acid
ctaggaaaggctagctacaacgaaaggcacg

SEQ ID NO: 17972 - DNA, 31 bp, Artificial Sequence
  Description of Artificial Sequence:  Enzymatic Nucleic Acid
cttgtgggggctagctacaacgataggaaac

SEQ ID NO: 17973 - DNA, 31 bp, Artificial Sequence
  Description of Artificial Sequence:  Enzymatic Nucleic Acid
cattcttgggctagctacaacgagggctagg

SEQ ID NO: 17974 - DNA, 31 bp, Artificial Sequence
  Description of Artificial Sequence:  Enzymatic Nucleic Acid
tgtttgcaggctagctacaacgatcttgtgg

SEQ ID NO: 17975 - DNA, 31 bp, Artificial Sequence
  Description of Artificial Sequence:  Enzymatic Nucleic Acid
gatgtttgggctagctacaacgaattcttgt

SEQ ID NO: 17976 - DNA, 31 bp, Artificial Sequence
  Description of Artificial Sequence:  Enzymatic Nucleic Acid
gtttgatgggctagctacaacgattgcattc

SEQ ID NO: 17977 - DNA, 31 bp, Artificial Sequence
  Description of Artificial Sequence:  Enzymatic Nucleic Acid
ctgtttgaggctagctacaacgagtttgcat

SEQ ID NO: 17978 - DNA, 31 bp, Artificial Sequence
  Description of Artificial Sequence:  Enzymatic Nucleic Acid
agtatctgggctagctacaacgattgatgtt

SEQ ID NO: 17979 - DNA, 31 bp, Artificial Sequence
  Description of Artificial Sequence:  Enzymatic Nucleic Acid
agcgagtaggctagctacaacgactgtttga

SEQ ID NO: 17980 - DNA, 31 bp, Artificial Sequence
  Description of Artificial Sequence:  Enzymatic Nucleic Acid
ctagcgagggctagctacaacgaatctgttt

SEQ ID NO: 17981 - DNA, 31 bp, Artificial Sequence
  Description of Artificial Sequence:  Enzymatic Nucleic Acid
gaggctagggctagctacaacgagagtatct

SEQ ID NO: 17982 - DNA, 31 bp, Artificial Sequence
  Description of Artificial Sequence:  Enzymatic Nucleic Acid
aaatgaggggctagctacaacgatagcgagt

SEQ ID NO: 17983 - DNA, 31 bp, Artificial Sequence
  Description of Artificial Sequence:  Enzymatic Nucleic Acid
aatttaaaggctagctacaacgagaggctag

SEQ ID NO: 17984 - DNA, 31 bp, Artificial Sequence
  Description of Artificial Sequence:  Enzymatic Nucleic Acid
ttaatcaaggctagctacaacgattaaatga

SEQ ID NO: 17985 - DNA, 31 bp, Artificial Sequence
  Description of Artificial Sequence:  Enzymatic Nucleic Acid
tcctttaaggctagctacaacgacaatttaa

SEQ ID NO: 17986 - DNA, 31 bp, Artificial Sequence
  Description of Artificial Sequence:  Enzymatic Nucleic Acid
aagatgcaggctagctacaacgatcctcctt

SEQ ID NO: 17987 - DNA, 31 bp, Artificial Sequence
  Description of Artificial Sequence:  Enzymatic Nucleic Acid
caaagatgggctagctacaacgaactcctcc

SEQ ID NO: 17988 - DNA, 31 bp, Artificial Sequence
  Description of Artificial Sequence:  Enzymatic Nucleic Acid
gccaaagaggctagctacaacgagcactcct

SEQ ID NO: 17989 - DNA, 31 bp, Artificial Sequence
  Description of Artificial Sequence:  Enzymatic Nucleic Acid
actgtcggggctagctacaacgacaaagatg

SEQ ID NO: 17990 - DNA, 31 bp, Artificial Sequence
  Description of Artificial Sequence:  Enzymatic Nucleic Acid
caccactgggctagctacaacgacggccaaa

SEQ ID NO: 17991 - DNA, 31 bp, Artificial Sequence
  Description of Artificial Sequence:  Enzymatic Nucleic Acid
ttacaccaggctagctacaacgatgtcggcc

SEQ ID NO: 17992 - DNA, 31 bp, Artificial Sequence
  Description of Artificial Sequence:  Enzymatic Nucleic Acid
cagttacaggctagctacaacgacactgtcg

SEQ ID NO: 17993 - DNA, 31 bp, Artificial Sequence
  Description of Artificial Sequence:  Enzymatic Nucleic Acid
cacagttaggctagctacaacgaaccactgt

SEQ ID NO: 17994 - DNA, 31 bp, Artificial Sequence
  Description of Artificial Sequence:  Enzymatic Nucleic Acid
acacacagggctagctacaacgatacaccac

SEQ ID NO: 17995 - DNA, 31 bp, Artificial Sequence
  Description of Artificial Sequence:  Enzymatic Nucleic Acid
cacacacaggctagctacaacgaagttacac

SEQ ID NO: 17996 - DNA, 31 bp, Artificial Sequence
  Description of Artificial Sequence:  Enzymatic Nucleic Acid
cacacacaggctagctacaacgaacagttac

SEQ ID NO: 17997 - DNA, 31 bp, Artificial Sequence
  Description of Artificial Sequence:  Enzymatic Nucleic Acid
cacacacaggctagctacaacgaacacagtt

SEQ ID NO: 17998 - DNA, 31 bp, Artificial Sequence
  Description of Artificial Sequence:  Enzymatic Nucleic Acid
cacacacaggctagctacaacgaacacacag

SEQ ID NO: 17999 - DNA, 31 bp, Artificial Sequence
  Description of Artificial Sequence:  Enzymatic Nucleic Acid
cacacacaggctagctacaacgaacacacac

SEQ ID NO: 18000 - DNA, 31 bp, Artificial Sequence
  Description of Artificial Sequence:  Enzymatic Nucleic Acid
cccacacaggctagctacaacgaacacacac

SEQ ID NO: 18001 - DNA, 31 bp, Artificial Sequence
  Description of Artificial Sequence:  Enzymatic Nucleic Acid
cacccacaggctagctacaacgaacacacac

SEQ ID NO: 18002 - DNA, 31 bp, Artificial Sequence
  Description of Artificial Sequence:  Enzymatic Nucleic Acid
cacacccaggctagctacaacgaacacacac

SEQ ID NO: 18003 - DNA, 31 bp, Artificial Sequence
  Description of Artificial Sequence:  Enzymatic Nucleic Acid
cacccacaggctagctacaacgaccacacac

SEQ ID NO: 18004 - DNA, 31 bp, Artificial Sequence
  Description of Artificial Sequence:  Enzymatic Nucleic Acid
tacacccaggctagctacaacgaacccacac

SEQ ID NO: 18005 - DNA, 31 bp, Artificial Sequence
  Description of Artificial Sequence:  Enzymatic Nucleic Acid
cacatacaggctagctacaacgaccacaccc

SEQ ID NO: 18006 - DNA, 31 bp, Artificial Sequence
  Description of Artificial Sequence:  Enzymatic Nucleic Acid
cacacataggctagctacaacgaacccacac

SEQ ID NO: 18007 - DNA, 31 bp, Artificial Sequence
  Description of Artificial Sequence:  Enzymatic Nucleic Acid
aacacacaggctagctacaacgaacacccac

SEQ ID NO: 18008 - DNA, 31 bp, Artificial Sequence
  Description of Artificial Sequence:  Enzymatic Nucleic Acid
aaaacacaggctagctacaacgaatacaccc

SEQ ID NO: 18009 - DNA, 31 bp, Artificial Sequence
  Description of Artificial Sequence:  Enzymatic Nucleic Acid
acaaaacaggctagctacaacgaacatacac

SEQ ID NO: 18010 - DNA, 31 bp, Artificial Sequence
  Description of Artificial Sequence:  Enzymatic Nucleic Acid
gcacaaaaggctagctacaacgaacacatac

SEQ ID NO: 18011 - DNA, 31 bp, Artificial Sequence
  Description of Artificial Sequence:  Enzymatic Nucleic Acid
gttatgcaggctagctacaacgaaaaacaca

SEQ ID NO: 18012 - DNA, 31 bp, Artificial Sequence
  Description of Artificial Sequence:  Enzymatic Nucleic Acid
tagttatgggctagctacaacgaacaaaaca

SEQ ID NO: 18013 - DNA, 31 bp, Artificial Sequence
  Description of Artificial Sequence:  Enzymatic Nucleic Acid
aatagttaggctagctacaacgagcacaaaa

SEQ ID NO: 18014 - DNA, 31 bp, Artificial Sequence
  Description of Artificial Sequence:  Enzymatic Nucleic Acid
ttaaatagggctagctacaacgatatgcaca

SEQ ID NO: 18015 - DNA, 31 bp, Artificial Sequence
  Description of Artificial Sequence:  Enzymatic Nucleic Acid
tccttaaaggctagctacaacgaagttatgc

SEQ ID NO: 18016 - DNA, 31 bp, Artificial Sequence
  Description of Artificial Sequence:  Enzymatic Nucleic Acid
aattccagggctagctacaacgattccttaa

SEQ ID NO: 18017 - DNA, 31 bp, Artificial Sequence
  Description of Artificial Sequence:  Enzymatic Nucleic Acid
ctttaaaaggctagctacaacgatccagttt

SEQ ID NO: 18018 - DNA, 31 bp, Artificial Sequence
  Description of Artificial Sequence:  Enzymatic Nucleic Acid
aaaagtaaggctagctacaacgatttaaaat

SEQ ID NO: 18019 - DNA, 31 bp, Artificial Sequence
  Description of Artificial Sequence:  Enzymatic Nucleic Acid
tataaaagggctagctacaacgaaactttaa

SEQ ID NO: 18020 - DNA, 31 bp, Artificial Sequence
  Description of Artificial Sequence:  Enzymatic Nucleic Acid
ggtttgtaggctagctacaacgaaaaagtaa

SEQ ID NO: 18021 - DNA, 31 bp, Artificial Sequence
  Description of Artificial Sequence:  Enzymatic Nucleic Acid
ttggtttgggctagctacaacgaataaaagt

SEQ ID NO: 18022 - DNA, 31 bp, Artificial Sequence
  Description of Artificial Sequence:  Enzymatic Nucleic Acid
attcttggggctagctacaacgattgtataa

SEQ ID NO: 18023 - DNA, 31 bp, Artificial Sequence
  Description of Artificial Sequence:  Enzymatic Nucleic Acid
agcatataggctagctacaacgatcttggtt

SEQ ID NO: 18024 - DNA, 31 bp, Artificial Sequence
  Description of Artificial Sequence:  Enzymatic Nucleic Acid
gtagcataggctagctacaacgaattcttgg

SEQ ID NO: 18025 - DNA, 31 bp, Artificial Sequence
  Description of Artificial Sequence:  Enzymatic Nucleic Acid
ctgtagcaggctagctacaacgaatattctt

SEQ ID NO: 18026 - DNA, 31 bp, Artificial Sequence
  Description of Artificial Sequence:  Enzymatic Nucleic Acid
atctgtagggctagctacaacgaatatattc

SEQ ID NO: 18027 - DNA, 31 bp, Artificial Sequence
  Description of Artificial Sequence:  Enzymatic Nucleic Acid
tatatctgggctagctacaacgaagcatata

SEQ ID NO: 18028 - DNA, 31 bp, Artificial Sequence
  Description of Artificial Sequence:  Enzymatic Nucleic Acid
gtcttataggctagctacaacgactgtagca

SEQ ID NO: 18029 - DNA, 31 bp, Artificial Sequence
  Description of Artificial Sequence:  Enzymatic Nucleic Acid
ctgtcttaggctagctacaacgaatctgtag

SEQ ID NO: 18030 - DNA, 31 bp, Artificial Sequence
  Description of Artificial Sequence:  Enzymatic Nucleic Acid
catgtctgggctagctacaacgacttatatc

SEQ ID NO: 18031 - DNA, 31 bp, Artificial Sequence
  Description of Artificial Sequence:  Enzymatic Nucleic Acid
aaaccatgggctagctacaacgactgtctta

SEQ ID NO: 18032 - DNA, 31 bp, Artificial Sequence
  Description of Artificial Sequence:  Enzymatic Nucleic Acid
ccaaaccaggctagctacaacgagtctgtct

SEQ ID NO: 18033 - DNA, 31 bp, Artificial Sequence
  Description of Artificial Sequence:  Enzymatic Nucleic Acid
ggaccaaaggctagctacaacgacatgtctg

SEQ ID NO: 18034 - DNA, 31 bp, Artificial Sequence
  Description of Artificial Sequence:  Enzymatic Nucleic Acid
atataggaggctagctacaacgacaaaccat

SEQ ID NO: 18035 - DNA, 31 bp, Artificial Sequence
  Description of Artificial Sequence:  Enzymatic Nucleic Acid
tagaaataggctagctacaacgaaggaccaa

SEQ ID NO: 18036 - DNA, 31 bp, Artificial Sequence
  Description of Artificial Sequence:  Enzymatic Nucleic Acid
actagaaaggctagctacaacgaataggacc

SEQ ID NO: 18037 - DNA, 31 bp, Artificial Sequence
  Description of Artificial Sequence:  Enzymatic Nucleic Acid
catcatgaggctagctacaacgatagaaata

SEQ ID NO: 18038 - DNA, 31 bp, Artificial Sequence
  Description of Artificial Sequence:  Enzymatic Nucleic Acid
attcatcaggctagctacaacgagactagaa

SEQ ID NO: 18039 - DNA, 31 bp, Artificial Sequence
  Description of Artificial Sequence:  Enzymatic Nucleic Acid
tacattcaggctagctacaacgacatgacta

SEQ ID NO: 18040 - DNA, 31 bp, Artificial Sequence
  Description of Artificial Sequence:  Enzymatic Nucleic Acid
aaaatacaggctagctacaacgatcatcatg

SEQ ID NO: 18041 - DNA, 31 bp, Artificial Sequence
  Description of Artificial Sequence:  Enzymatic Nucleic Acid
acaaaataggctagctacaacgaattcatca

SEQ ID NO: 18042 - DNA, 31 bp, Artificial Sequence
  Description of Artificial Sequence:  Enzymatic Nucleic Acid
atacaaaaggctagctacaacgaacattcat

SEQ ID NO: 18043 - DNA, 31 bp, Artificial Sequence
  Description of Artificial Sequence:  Enzymatic Nucleic Acid
atggtataggctagctacaacgaaaaataca

SEQ ID NO: 18044 - DNA, 31 bp, Artificial Sequence
  Description of Artificial Sequence:  Enzymatic Nucleic Acid
agatggtaggctagctacaacgaacaaaata

SEQ ID NO: 18045 - DNA, 31 bp, Artificial Sequence
  Description of Artificial Sequence:  Enzymatic Nucleic Acid
gaagatggggctagctacaacgaatacaaaa

SEQ ID NO: 18046 - DNA, 31 bp, Artificial Sequence
  Description of Artificial Sequence:  Enzymatic Nucleic Acid
tatgaagaggctagctacaacgaggtataca

SEQ ID NO: 18047 - DNA, 31 bp, Artificial Sequence
  Description of Artificial Sequence:  Enzymatic Nucleic Acid
atattataggctagctacaacgagaagatgg

SEQ ID NO: 18048 - DNA, 31 bp, Artificial Sequence
  Description of Artificial Sequence:  Enzymatic Nucleic Acid
gtatattaggctagctacaacgaatgaagat

SEQ ID NO: 18049 - DNA, 31 bp, Artificial Sequence
  Description of Artificial Sequence:  Enzymatic Nucleic Acid
taagtataggctagctacaacgatatatgaa

SEQ ID NO: 18050 - DNA, 31 bp, Artificial Sequence
  Description of Artificial Sequence:  Enzymatic Nucleic Acid
tttaagtaggctagctacaacgaattatatg

SEQ ID NO: 18051 - DNA, 31 bp, Artificial Sequence
  Description of Artificial Sequence:  Enzymatic Nucleic Acid
tttttaagggctagctacaacgaatattata

SEQ ID NO: 18052 - DNA, 31 bp, Artificial Sequence
  Description of Artificial Sequence:  Enzymatic Nucleic Acid
aagaaataggctagctacaacgattttaagt

SEQ ID NO: 18053 - DNA, 31 bp, Artificial Sequence
  Description of Artificial Sequence:  Enzymatic Nucleic Acid
ttaagaaaggctagctacaacgaatttttaa

SEQ ID NO: 18054 - DNA, 31 bp, Artificial Sequence
  Description of Artificial Sequence:  Enzymatic Nucleic Acid
aatcccaaggctagctacaacgataagaaat

SEQ ID NO: 18055 - DNA, 31 bp, Artificial Sequence
  Description of Artificial Sequence:  Enzymatic Nucleic Acid
attacaaaggctagctacaacgacccaatta

SEQ ID NO: 18056 - DNA, 31 bp, Artificial Sequence
  Description of Artificial Sequence:  Enzymatic Nucleic Acid
tacgattaggctagctacaacgaaaatccca

SEQ ID NO: 18057 - DNA, 31 bp, Artificial Sequence
  Description of Artificial Sequence:  Enzymatic Nucleic Acid
tggtacgaggctagctacaacgatacaaatc

SEQ ID NO: 18058 - DNA, 31 bp, Artificial Sequence
  Description of Artificial Sequence:  Enzymatic Nucleic Acid
agttggtaggctagctacaacgagattacaa

SEQ ID NO: 18059 - DNA, 31 bp, Artificial Sequence
  Description of Artificial Sequence:  Enzymatic Nucleic Acid
taagttggggctagctacaacgaacgattac

SEQ ID NO: 18060 - DNA, 31 bp, Artificial Sequence
  Description of Artificial Sequence:  Enzymatic Nucleic Acid
caattaagggctagctacaacgatggtacga

SEQ ID NO: 18061 - DNA, 31 bp, Artificial Sequence
  Description of Artificial Sequence:  Enzymatic Nucleic Acid
tttatcaaggctagctacaacgataagttgg

SEQ ID NO: 18062 - DNA, 31 bp, Artificial Sequence
  Description of Artificial Sequence:  Enzymatic Nucleic Acid
caagtttaggctagctacaacgacaattaag

SEQ ID NO: 18063 - DNA, 31 bp, Artificial Sequence
  Description of Artificial Sequence:  Enzymatic Nucleic Acid
ttgccaagggctagctacaacgattatcaat

SEQ ID NO: 18064 - DNA, 31 bp, Artificial Sequence
  Description of Artificial Sequence:  Enzymatic Nucleic Acid
agcagttgggctagctacaacgacaagttta

SEQ ID NO: 18065 - DNA, 31 bp, Artificial Sequence
  Description of Artificial Sequence:  Enzymatic Nucleic Acid
aaaagcagggctagctacaacgatgccaagt

SEQ ID NO: 18066 - DNA, 31 bp, Artificial Sequence
  Description of Artificial Sequence:  Enzymatic Nucleic Acid
cataaaagggctagctacaacgaagttgcca

SEQ ID NO: 18067 - DNA, 31 bp, Artificial Sequence
  Description of Artificial Sequence:  Enzymatic Nucleic Acid
acagaacaggctagctacaacgaaaaagcag

SEQ ID NO: 18068 - DNA, 31 bp, Artificial Sequence
  Description of Artificial Sequence:  Enzymatic Nucleic Acid
agacagaaggctagctacaacgaataaaagc

SEQ ID NO: 18069 - DNA, 31 bp, Artificial Sequence
  Description of Artificial Sequence:  Enzymatic Nucleic Acid
gaaggagaggctagctacaacgaagaacata

SEQ ID NO: 18070 - DNA, 31 bp, Artificial Sequence
  Description of Artificial Sequence:  Enzymatic Nucleic Acid
aaaatttaggctagctacaacgaggaaggag

SEQ ID NO: 18071 - DNA, 31 bp, Artificial Sequence
  Description of Artificial Sequence:  Enzymatic Nucleic Acid
ttgaaaaaggctagctacaacgattatggaa

SEQ ID NO: 18072 - DNA, 31 bp, Artificial Sequence
  Description of Artificial Sequence:  Enzymatic Nucleic Acid
aattagtaggctagctacaacgatttgaaaa

SEQ ID NO: 18073 - DNA, 31 bp, Artificial Sequence
  Description of Artificial Sequence:  Enzymatic Nucleic Acid
tgaattagggctagctacaacgaattttgaa

SEQ ID NO: 18074 - DNA, 31 bp, Artificial Sequence
  Description of Artificial Sequence:  Enzymatic Nucleic Acid
ttgttgaaggctagctacaacgatagtattt

SEQ ID NO: 18075 - DNA, 31 bp, Artificial Sequence
  Description of Artificial Sequence:  Enzymatic Nucleic Acid
tttctttgggctagctacaacgatgaattag

SEQ ID NO: 18076 - DNA, 31 bp, Artificial Sequence
  Description of Artificial Sequence:  Enzymatic Nucleic Acid
aaaaagagggctagctacaacgatttttctt

SEQ ID NO: 18077 - DNA, 31 bp, Artificial Sequence
  Description of Artificial Sequence:  Enzymatic Nucleic Acid
tgagtttaggctagctacaacgatttaggaa

SEQ ID NO: 18078 - DNA, 31 bp, Artificial Sequence
  Description of Artificial Sequence:  Enzymatic Nucleic Acid
aatttgagggctagctacaacgattatttta

SEQ ID NO: 18079 - DNA, 31 bp, Artificial Sequence
  Description of Artificial Sequence:  Enzymatic Nucleic Acid
aggataaaggctagctacaacgattgagttt

SEQ ID NO: 18080 - DNA, 31 bp, Artificial Sequence
  Description of Artificial Sequence:  Enzymatic Nucleic Acid
aacaaggaggctagctacaacgaaaatttga

SEQ ID NO: 18081 - DNA, 31 bp, Artificial Sequence
  Description of Artificial Sequence:  Enzymatic Nucleic Acid
gctctaaaggctagctacaacgaaaggataa

SEQ ID NO: 18082 - DNA, 31 bp, Artificial Sequence
  Description of Artificial Sequence:  Enzymatic Nucleic Acid
tttctctgggctagctacaacgatctaaaca

SEQ ID NO: 18083 - DNA, 31 bp, Artificial Sequence
  Description of Artificial Sequence:  Enzymatic Nucleic Acid
tttcttaaggctagctacaacgattttctct

SEQ ID NO: 18084 - DNA, 31 bp, Artificial Sequence
  Description of Artificial Sequence:  Enzymatic Nucleic Acid
tttcaaagggctagctacaacgattttctta

SEQ ID NO: 18085 - DNA, 31 bp, Artificial Sequence
  Description of Artificial Sequence:  Enzymatic Nucleic Acid
tgagaccaggctagctacaacgattcaaagt

SEQ ID NO: 18086 - DNA, 31 bp, Artificial Sequence
  Description of Artificial Sequence:  Enzymatic Nucleic Acid
ttttgagaggctagctacaacgacatttcaa

SEQ ID NO: 18087 - DNA, 31 bp, Artificial Sequence
  Description of Artificial Sequence:  Enzymatic Nucleic Acid
tttagcaaggctagctacaacgatttttgag

SEQ ID NO: 18088 - DNA, 31 bp, Artificial Sequence
  Description of Artificial Sequence:  Enzymatic Nucleic Acid
atatttagggctagctacaacgaaatttttt

SEQ ID NO: 18089 - DNA, 31 bp, Artificial Sequence
  Description of Artificial Sequence:  Enzymatic Nucleic Acid
tgaaaataggctagctacaacgattagcaat

SEQ ID NO: 18090 - DNA, 31 bp, Artificial Sequence
  Description of Artificial Sequence:  Enzymatic Nucleic Acid
attgaaaaggctagctacaacgaatttagca

SEQ ID NO: 18091 - DNA, 31 bp, Artificial Sequence
  Description of Artificial Sequence:  Enzymatic Nucleic Acid
gttttccaggctagctacaacgatgaaaata

SEQ ID NO: 18092 - DNA, 31 bp, Artificial Sequence
  Description of Artificial Sequence:  Enzymatic Nucleic Acid
acatttagggctagctacaacgatttccatt

SEQ ID NO: 18093 - DNA, 31 bp, Artificial Sequence
  Description of Artificial Sequence:  Enzymatic Nucleic Acid
aactaacaggctagctacaacgattagtttt

SEQ ID NO: 18094 - DNA, 31 bp, Artificial Sequence
  Description of Artificial Sequence:  Enzymatic Nucleic Acid
taaactaaggctagctacaacgaatttagtt

SEQ ID NO: 18095 - DNA, 31 bp, Artificial Sequence
  Description of Artificial Sequence:  Enzymatic Nucleic Acid
cagctaaaggctagctacaacgataacattt

SEQ ID NO: 18096 - DNA, 31 bp, Artificial Sequence
  Description of Artificial Sequence:  Enzymatic Nucleic Acid
acaatcagggctagctacaacgataaactaa

SEQ ID NO: 18097 - DNA, 31 bp, Artificial Sequence
  Description of Artificial Sequence:  Enzymatic Nucleic Acid
ccatacaaggctagctacaacgacagctaaa

SEQ ID NO: 18098 - DNA, 31 bp, Artificial Sequence
  Description of Artificial Sequence:  Enzymatic Nucleic Acid
accccataggctagctacaacgaaatcagct

SEQ ID NO: 18099 - DNA, 31 bp, Artificial Sequence
  Description of Artificial Sequence:  Enzymatic Nucleic Acid
aaaccccaggctagctacaacgaacaatcag

SEQ ID NO: 18100 - DNA, 31 bp, Artificial Sequence
  Description of Artificial Sequence:  Enzymatic Nucleic Acid
ttcgaaaaggctagctacaacgacccataca

SEQ ID NO: 18101 - DNA, 31 bp, Artificial Sequence
  Description of Artificial Sequence:  Enzymatic Nucleic Acid
gtgaaaggggctagctacaacgatcgaaaac

SEQ ID NO: 18102 - DNA, 31 bp, Artificial Sequence
  Description of Artificial Sequence:  Enzymatic Nucleic Acid
acaaaaagggctagctacaacgagaaaggtt

SEQ ID NO: 18103 - DNA, 31 bp, Artificial Sequence
  Description of Artificial Sequence:  Enzymatic Nucleic Acid
aaaacaaaggctagctacaacgaaaaaagtg

SEQ ID NO: 18104 - DNA, 31 bp, Artificial Sequence
  Description of Artificial Sequence:  Enzymatic Nucleic Acid
aggtaaaaggctagctacaacgaaaacaaaa

SEQ ID NO: 18105 - DNA, 31 bp, Artificial Sequence
  Description of Artificial Sequence:  Enzymatic Nucleic Acid
gaaataggggctagctacaacgaaaaacaaa

SEQ ID NO: 18106 - DNA, 31 bp, Artificial Sequence
  Description of Artificial Sequence:  Enzymatic Nucleic Acid
ttgtgaaaggctagctacaacgaaggtaaaa

SEQ ID NO: 18107 - DNA, 31 bp, Artificial Sequence
  Description of Artificial Sequence:  Enzymatic Nucleic Acid
cacagttgggctagctacaacgagaaatagg

SEQ ID NO: 18108 - DNA, 31 bp, Artificial Sequence
  Description of Artificial Sequence:  Enzymatic Nucleic Acid
ttacacagggctagctacaacgatgtgaaat

SEQ ID NO: 18109 - DNA, 31 bp, Artificial Sequence
  Description of Artificial Sequence:  Enzymatic Nucleic Acid
aatttacaggctagctacaacgaagttgtga

SEQ ID NO: 18110 - DNA, 31 bp, Artificial Sequence
  Description of Artificial Sequence:  Enzymatic Nucleic Acid
gcaatttaggctagctacaacgaacagttgt

SEQ ID NO: 18111 - DNA, 31 bp, Artificial Sequence
  Description of Artificial Sequence:  Enzymatic Nucleic Acid
attggcaaggctagctacaacgattacacag

SEQ ID NO: 18112 - DNA, 31 bp, Artificial Sequence
  Description of Artificial Sequence:  Enzymatic Nucleic Acid
attattggggctagctacaacgaaatttaca

SEQ ID NO: 18113 - DNA, 31 bp, Artificial Sequence
  Description of Artificial Sequence:  Enzymatic Nucleic Acid
aggaattaggctagctacaacgatggcaatt

SEQ ID NO: 18114 - DNA, 31 bp, Artificial Sequence
  Description of Artificial Sequence:  Enzymatic Nucleic Acid
gacaggaaggctagctacaacgatattggca

SEQ ID NO: 18115 - DNA, 31 bp, Artificial Sequence
  Description of Artificial Sequence:  Enzymatic Nucleic Acid
ttcatggaggctagctacaacgaaggaatta

SEQ ID NO: 18116 - DNA, 31 bp, Artificial Sequence
  Description of Artificial Sequence:  Enzymatic Nucleic Acid
cattttcaggctagctacaacgaggacagga

SEQ ID NO: 18117 - DNA, 31 bp, Artificial Sequence
  Description of Artificial Sequence:  Enzymatic Nucleic Acid
aatttgcaggctagctacaacgatttcatgg

SEQ ID NO: 18118 - DNA, 31 bp, Artificial Sequence
  Description of Artificial Sequence:  Enzymatic Nucleic Acid
ataatttgggctagctacaacgaattttcat

SEQ ID NO: 18119 - DNA, 31 bp, Artificial Sequence
  Description of Artificial Sequence:  Enzymatic Nucleic Acid
ctggataaggctagctacaacgattgcattt

SEQ ID NO: 18120 - DNA, 31 bp, Artificial Sequence
  Description of Artificial Sequence:  Enzymatic Nucleic Acid
acactggaggctagctacaacgaaatttgca

SEQ ID NO: 18121 - DNA, 31 bp, Artificial Sequence
  Description of Artificial Sequence:  Enzymatic Nucleic Acid
tatctacaggctagctacaacgatggataat

SEQ ID NO: 18122 - DNA, 31 bp, Artificial Sequence
  Description of Artificial Sequence:  Enzymatic Nucleic Acid
tatatctaggctagctacaacgaactggata

SEQ ID NO: 18123 - DNA, 31 bp, Artificial Sequence
  Description of Artificial Sequence:  Enzymatic Nucleic Acid
caaatataggctagctacaacgactacactg

SEQ ID NO: 18124 - DNA, 31 bp, Artificial Sequence
  Description of Artificial Sequence:  Enzymatic Nucleic Acid
gtcaaataggctagctacaacgaatctacac

SEQ ID NO: 18125 - DNA, 31 bp, Artificial Sequence
  Description of Artificial Sequence:  Enzymatic Nucleic Acid
tggtcaaaggctagctacaacgaatatctac

SEQ ID NO: 18126 - DNA, 31 bp, Artificial Sequence
  Description of Artificial Sequence:  Enzymatic Nucleic Acid
ggtgatggggctagctacaacgacaaatata

SEQ ID NO: 18127 - DNA, 31 bp, Artificial Sequence
  Description of Artificial Sequence:  Enzymatic Nucleic Acid
tagggtgaggctagctacaacgaggtcaaat

SEQ ID NO: 18128 - DNA, 31 bp, Artificial Sequence
  Description of Artificial Sequence:  Enzymatic Nucleic Acid
ccatagggggctagctacaacgagatggtca

SEQ ID NO: 18129 - DNA, 31 bp, Artificial Sequence
  Description of Artificial Sequence:  Enzymatic Nucleic Acid
aatatccaggctagctacaacgaagggtgat

SEQ ID NO: 18130 - DNA, 31 bp, Artificial Sequence
  Description of Artificial Sequence:  Enzymatic Nucleic Acid
agccaataggctagctacaacgaccataggg

SEQ ID NO: 18131 - DNA, 31 bp, Artificial Sequence
  Description of Artificial Sequence:  Enzymatic Nucleic Acid
ctagccaaggctagctacaacgaatccatag

SEQ ID NO: 18132 - DNA, 31 bp, Artificial Sequence
  Description of Artificial Sequence:  Enzymatic Nucleic Acid
aaaactagggctagctacaacgacaatatcc

SEQ ID NO: 18133 - DNA, 31 bp, Artificial Sequence
  Description of Artificial Sequence:  Enzymatic Nucleic Acid
aggcaaaaggctagctacaacgatagccaat

SEQ ID NO: 18134 - DNA, 31 bp, Artificial Sequence
  Description of Artificial Sequence:  Enzymatic Nucleic Acid
aataaaggggctagctacaacgaaaaactag

SEQ ID NO: 18135 - DNA, 31 bp, Artificial Sequence
  Description of Artificial Sequence:  Enzymatic Nucleic Acid
ttgcttaaggctagctacaacgaaaaggcaa

SEQ ID NO: 18136 - DNA, 31 bp, Artificial Sequence
  Description of Artificial Sequence:  Enzymatic Nucleic Acid
tgaatttgggctagctacaacgattaataaa

SEQ ID NO: 18137 - DNA, 31 bp, Artificial Sequence
  Description of Artificial Sequence:  Enzymatic Nucleic Acid
gaaatgaaggctagctacaacgattgcttaa

SEQ ID NO: 18138 - DNA, 31 bp, Artificial Sequence
  Description of Artificial Sequence:  Enzymatic Nucleic Acid
ggctgaaaggctagctacaacgagaatttgc

SEQ ID NO: 18139 - DNA, 31 bp, Artificial Sequence
  Description of Artificial Sequence:  Enzymatic Nucleic Acid
cattcaggggctagctacaacgatgaaatga

SEQ ID NO: 18140 - DNA, 31 bp, Artificial Sequence
  Description of Artificial Sequence:  Enzymatic Nucleic Acid
ggcagacaggctagctacaacgatcaggctg

SEQ ID NO: 18141 - DNA, 31 bp, Artificial Sequence
  Description of Artificial Sequence:  Enzymatic Nucleic Acid
taggcagaggctagctacaacgaattcaggc

SEQ ID NO: 18142 - DNA, 31 bp, Artificial Sequence
  Description of Artificial Sequence:  Enzymatic Nucleic Acid
tatataggggctagctacaacgaagacattc

SEQ ID NO: 18143 - DNA, 31 bp, Artificial Sequence
  Description of Artificial Sequence:  Enzymatic Nucleic Acid
agaatataggctagctacaacgaaggcagac

SEQ ID NO: 18144 - DNA, 31 bp, Artificial Sequence
  Description of Artificial Sequence:  Enzymatic Nucleic Acid
agagaataggctagctacaacgaataggcag

SEQ ID NO: 18145 - DNA, 31 bp, Artificial Sequence
  Description of Artificial Sequence:  Enzymatic Nucleic Acid
gcagagaaggctagctacaacgaatataggc

SEQ ID NO: 18146 - DNA, 31 bp, Artificial Sequence
  Description of Artificial Sequence:  Enzymatic Nucleic Acid
acaaagagggctagctacaacgaagagaata

SEQ ID NO: 18147 - DNA, 31 bp, Artificial Sequence
  Description of Artificial Sequence:  Enzymatic Nucleic Acid
ggagaataggctagctacaacgaaaagagca

SEQ ID NO: 18148 - DNA, 31 bp, Artificial Sequence
  Description of Artificial Sequence:  Enzymatic Nucleic Acid
aaggagaaggctagctacaacgaacaaagag

SEQ ID NO: 18149 - DNA, 31 bp, Artificial Sequence
  Description of Artificial Sequence:  Enzymatic Nucleic Acid
ttaacgggggctagctacaacgatcaaagga

SEQ ID NO: 18150 - DNA, 31 bp, Artificial Sequence
  Description of Artificial Sequence:  Enzymatic Nucleic Acid
tgttttaaggctagctacaacgagggttcaa

SEQ ID NO: 18151 - DNA, 31 bp, Artificial Sequence
  Description of Artificial Sequence:  Enzymatic Nucleic Acid
acaggatgggctagctacaacgatttaacgg

SEQ ID NO: 18152 - DNA, 31 bp, Artificial Sequence
  Description of Artificial Sequence:  Enzymatic Nucleic Acid
ccacaggaggctagctacaacgagttttaac

SEQ ID NO: 18153 - DNA, 31 bp, Artificial Sequence
  Description of Artificial Sequence:  Enzymatic Nucleic Acid
gagtgccaggctagctacaacgaaggatgtt

SEQ ID NO: 18154 - RNA, 37 nt, Artificial Sequence
  Description of Artificial Sequence:  Enzymatic Nucleic Acid
gggaggaggccgaaaggcgagugaggucucgagagga

SEQ ID NO: 18155 - RNA, 37 nt, Artificial Sequence
  Description of Artificial Sequence:  Enzymatic Nucleic Acid
cgccgcuggccgaaaggcgagugaggucucggggagg

SEQ ID NO: 18156 - RNA, 37 nt, Artificial Sequence
  Description of Artificial Sequence:  Enzymatic Nucleic Acid
cgccgccggccgaaaggcgagugaggucuugccgggg

SEQ ID NO: 18157 - RNA, 37 nt, Artificial Sequence
  Description of Artificial Sequence:  Enzymatic Nucleic Acid
agccgccggccgaaaggcgagugaggucucgcugccg

SEQ ID NO: 18158 - RNA, 37 nt, Artificial Sequence
  Description of Artificial Sequence:  Enzymatic Nucleic Acid
ccgagccggccgaaaggcgagugaggucucgccgcug

SEQ ID NO: 18159 - RNA, 37 nt, Artificial Sequence
  Description of Artificial Sequence:  Enzymatic Nucleic Acid
gcuccgaggccgaaaggcgagugaggucucgccgccg

SEQ ID NO: 18160 - RNA, 37 nt, Artificial Sequence
  Description of Artificial Sequence:  Enzymatic Nucleic Acid
ggagcccggccgaaaggcgagugaggucuuccgagcc

SEQ ID NO: 18161 - RNA, 37 nt, Artificial Sequence
  Description of Artificial Sequence:  Enzymatic Nucleic Acid
ccccggaggccgaaaggcgagugaggucuccgcuccg

SEQ ID NO: 18162 - RNA, 37 nt, Artificial Sequence
  Description of Artificial Sequence:  Enzymatic Nucleic Acid
cacccgaggccgaaaggcgagugaggucucccggagc

SEQ ID NO: 18163 - RNA, 37 nt, Artificial Sequence
  Description of Artificial Sequence:  Enzymatic Nucleic Acid
ccgcugcagccgaaaggcgagugaggucuccgagccc

SEQ ID NO: 18164 - RNA, 37 nt, Artificial Sequence
  Description of Artificial Sequence:  Enzymatic Nucleic Acid
ggccgcuggccgaaaggcgagugaggucuacccgagc

SEQ ID NO: 18165 - RNA, 37 nt, Artificial Sequence
  Description of Artificial Sequence:  Enzymatic Nucleic Acid
gcuggccggccgaaaggcgagugaggucuugcacccg

SEQ ID NO: 18166 - RNA, 37 nt, Artificial Sequence
  Description of Artificial Sequence:  Enzymatic Nucleic Acid
cccgcugggccgaaaggcgagugaggucucgcugcac

SEQ ID NO: 18167 - RNA, 37 nt, Artificial Sequence
  Description of Artificial Sequence:  Enzymatic Nucleic Acid
caggcccggccgaaaggcgagugaggucuuggccgcu

SEQ ID NO: 18168 - RNA, 37 nt, Artificial Sequence
  Description of Artificial Sequence:  Enzymatic Nucleic Acid
ccgccagggccgaaaggcgagugaggucuccgcuggc

SEQ ID NO: 18169 - RNA, 37 nt, Artificial Sequence
  Description of Artificial Sequence:  Enzymatic Nucleic Acid
ccucgccggccgaaaggcgagugaggucucaggcccg

SEQ ID NO: 18170 - RNA, 37 nt, Artificial Sequence
  Description of Artificial Sequence:  Enzymatic Nucleic Acid
aauccucggccgaaaggcgagugaggucucgccaggc

SEQ ID NO: 18171 - RNA, 37 nt, Artificial Sequence
  Description of Artificial Sequence:  Enzymatic Nucleic Acid
gacaaccagccgaaaggcgagugaggucuuuccccgg

SEQ ID NO: 18172 - RNA, 37 nt, Artificial Sequence
  Description of Artificial Sequence:  Enzymatic Nucleic Acid
ggagacaagccgaaaggcgagugaggucucacuuccc

SEQ ID NO: 18173 - RNA, 37 nt, Artificial Sequence
  Description of Artificial Sequence:  Enzymatic Nucleic Acid
ccaggagagccgaaaggcgagugaggucuaaccacuu

SEQ ID NO: 18174 - RNA, 37 nt, Artificial Sequence
  Description of Artificial Sequence:  Enzymatic Nucleic Acid
ggcuccaggccgaaaggcgagugaggucucaggagac

SEQ ID NO: 18175 - RNA, 37 nt, Artificial Sequence
  Description of Artificial Sequence:  Enzymatic Nucleic Acid
ucucgcgggccgaaaggcgagugaggucuuccagcca

SEQ ID NO: 18176 - RNA, 37 nt, Artificial Sequence
  Description of Artificial Sequence:  Enzymatic Nucleic Acid
ccgucucggccgaaaggcgagugaggucuggcuccag

SEQ ID NO: 18177 - RNA, 37 nt, Artificial Sequence
  Description of Artificial Sequence:  Enzymatic Nucleic Acid
ccugagcggccgaaaggcgagugaggucuccgucucg

SEQ ID NO: 18178 - RNA, 37 nt, Artificial Sequence
  Description of Artificial Sequence:  Enzymatic Nucleic Acid
gcccugaggccgaaaggcgagugaggucugcccgucu

SEQ ID NO: 18179 - RNA, 37 nt, Artificial Sequence
  Description of Artificial Sequence:  Enzymatic Nucleic Acid
gccccgcggccgaaaggcgagugaggucuccugagcg

SEQ ID NO: 18180 - RNA, 37 nt, Artificial Sequence
  Description of Artificial Sequence:  Enzymatic Nucleic Acid
cggccccggccgaaaggcgagugaggucugcccugag

SEQ ID NO: 18181 - RNA, 37 nt, Artificial Sequence
  Description of Artificial Sequence:  Enzymatic Nucleic Acid
gccgccgggccgaaaggcgagugaggucucccgcgcc

SEQ ID NO: 18182 - RNA, 37 nt, Artificial Sequence
  Description of Artificial Sequence:  Enzymatic Nucleic Acid
cgccgccggccgaaaggcgagugaggucucggccccg

SEQ ID NO: 18183 - RNA, 37 nt, Artificial Sequence
  Description of Artificial Sequence:  Enzymatic Nucleic Acid
guucgccggccgaaaggcgagugaggucucgccggcc

SEQ ID NO: 18184 - RNA, 37 nt, Artificial Sequence
  Description of Artificial Sequence:  Enzymatic Nucleic Acid
cucguucggccgaaaggcgagugaggucucgccgccg

SEQ ID NO: 18185 - RNA, 37 nt, Artificial Sequence
  Description of Artificial Sequence:  Enzymatic Nucleic Acid
cccggccggccgaaaggcgagugaggucucagagucc

SEQ ID NO: 18186 - RNA, 37 nt, Artificial Sequence
  Description of Artificial Sequence:  Enzymatic Nucleic Acid
cgacccgggccgaaaggcgagugaggucucgccagag

SEQ ID NO: 18187 - RNA, 37 nt, Artificial Sequence
  Description of Artificial Sequence:  Enzymatic Nucleic Acid
gccaacgagccgaaaggcgagugaggucuccggccgc

SEQ ID NO: 18188 - RNA, 37 nt, Artificial Sequence
  Description of Artificial Sequence:  Enzymatic Nucleic Acid
ccggccaagccgaaaggcgagugaggucugacccggc

SEQ ID NO: 18189 - RNA, 37 nt, Artificial Sequence
  Description of Artificial Sequence:  Enzymatic Nucleic Acid
ucccccgggccgaaaggcgagugaggucucaacgacc

SEQ ID NO: 18190 - RNA, 37 nt, Artificial Sequence
  Description of Artificial Sequence:  Enzymatic Nucleic Acid
ugcccgcggccgaaaggcgagugaggucuucccccgg

SEQ ID NO: 18191 - RNA, 37 nt, Artificial Sequence
  Description of Artificial Sequence:  Enzymatic Nucleic Acid
ggugcccggccgaaaggcgagugaggucugcuccccc

SEQ ID NO: 18192 - RNA, 37 nt, Artificial Sequence
  Description of Artificial Sequence:  Enzymatic Nucleic Acid
gcccgguggccgaaaggcgagugaggucuccgcgcuc

SEQ ID NO: 18193 - RNA, 37 nt, Artificial Sequence
  Description of Artificial Sequence:  Enzymatic Nucleic Acid
ccugcucggccgaaaggcgagugaggucuccggugcc

SEQ ID NO: 18194 - RNA, 37 nt, Artificial Sequence
  Description of Artificial Sequence:  Enzymatic Nucleic Acid
gcggccuggccgaaaggcgagugaggucuucgcccgg

SEQ ID NO: 18195 - RNA, 37 nt, Artificial Sequence
  Description of Artificial Sequence:  Enzymatic Nucleic Acid
cgacgcgggccgaaaggcgagugaggucucugcucgc

SEQ ID NO: 18196 - RNA, 37 nt, Artificial Sequence
  Description of Artificial Sequence:  Enzymatic Nucleic Acid
gcgcgacggccgaaaggcgagugaggucuggccugcu

SEQ ID NO: 18197 - RNA, 37 nt, Artificial Sequence
  Description of Artificial Sequence:  Enzymatic Nucleic Acid
gagcgcgagccgaaaggcgagugaggucugcggccug

SEQ ID NO: 18198 - RNA, 37 nt, Artificial Sequence
  Description of Artificial Sequence:  Enzymatic Nucleic Acid
ggugagcggccgaaaggcgagugaggucugacgcggc

SEQ ID NO: 18199 - RNA, 37 nt, Artificial Sequence
  Description of Artificial Sequence:  Enzymatic Nucleic Acid
auggugaggccgaaaggcgagugaggucugcgacgcg

SEQ ID NO: 18200 - RNA, 37 nt, Artificial Sequence
  Description of Artificial Sequence:  Enzymatic Nucleic Acid
guagcugagccgaaaggcgagugaggucucaugguga

SEQ ID NO: 18201 - RNA, 37 nt, Artificial Sequence
  Description of Artificial Sequence:  Enzymatic Nucleic Acid
cccaguaggccgaaaggcgagugaggucuugaccaug

SEQ ID NO: 18202 - RNA, 37 nt, Artificial Sequence
  Description of Artificial Sequence:  Enzymatic Nucleic Acid
cagcaggagccgaaaggcgagugaggucucccggugu

SEQ ID NO: 18203 - RNA, 37 nt, Artificial Sequence
  Description of Artificial Sequence:  Enzymatic Nucleic Acid
gcgcacaggccgaaaggcgagugaggucuaggacccc

SEQ ID NO: 18204 - RNA, 37 nt, Artificial Sequence
  Description of Artificial Sequence:  Enzymatic Nucleic Acid
agcgcgcagccgaaaggcgagugaggucuagcaggac

SEQ ID NO: 18205 - RNA, 37 nt, Artificial Sequence
  Description of Artificial Sequence:  Enzymatic Nucleic Acid
gcagcgcggccgaaaggcgagugaggucuacagcagg

SEQ ID NO: 18206 - RNA, 37 nt, Artificial Sequence
  Description of Artificial Sequence:  Enzymatic Nucleic Acid
gagcagcggccgaaaggcgagugaggucugcacagca

SEQ ID NO: 18207 - RNA, 37 nt, Artificial Sequence
  Description of Artificial Sequence:  Enzymatic Nucleic Acid
cugagcaggccgaaaggcgagugaggucugcgcacag

SEQ ID NO: 18208 - RNA, 37 nt, Artificial Sequence
  Description of Artificial Sequence:  Enzymatic Nucleic Acid
cagcugaggccgaaaggcgagugaggucuagcgcgca

SEQ ID NO: 18209 - RNA, 37 nt, Artificial Sequence
  Description of Artificial Sequence:  Enzymatic Nucleic Acid
gcagacaggccgaaaggcgagugaggucuugagcagc

SEQ ID NO: 18210 - RNA, 37 nt, Artificial Sequence
  Description of Artificial Sequence:  Enzymatic Nucleic Acid
gaagcagagccgaaaggcgagugaggucuagcugagc

SEQ ID NO: 18211 - RNA, 37 nt, Artificial Sequence
  Description of Artificial Sequence:  Enzymatic Nucleic Acid
gugagaaggccgaaaggcgagugaggucuagacagcu

SEQ ID NO: 18212 - RNA, 37 nt, Artificial Sequence
  Description of Artificial Sequence:  Enzymatic Nucleic Acid
aaccugaagccgaaaggcgagugaggucuuagauccu

SEQ ID NO: 18213 - RNA, 37 nt, Artificial Sequence
  Description of Artificial Sequence:  Enzymatic Nucleic Acid
auuuugaagccgaaaggcgagugaggucucugaacua

SEQ ID NO: 18214 - RNA, 37 nt, Artificial Sequence
  Description of Artificial Sequence:  Enzymatic Nucleic Acid
cuuuuaaagccgaaaggcgagugaggucuucaguuca

SEQ ID NO: 18215 - RNA, 37 nt, Artificial Sequence
  Description of Artificial Sequence:  Enzymatic Nucleic Acid
gcuggguggccgaaaggcgagugaggucucuuuuaaa

SEQ ID NO: 18216 - RNA, 37 nt, Artificial Sequence
  Description of Artificial Sequence:  Enzymatic Nucleic Acid
augauguggccgaaaggcgagugaggucuugggugcc

SEQ ID NO: 18217 - RNA, 37 nt, Artificial Sequence
  Description of Artificial Sequence:  Enzymatic Nucleic Acid
ccugcuuggccgaaaggcgagugaggucuaugaugug

SEQ ID NO: 18218 - RNA, 37 nt, Artificial Sequence
  Description of Artificial Sequence:  Enzymatic Nucleic Acid
cuggccuggccgaaaggcgagugaggucuuugcauga

SEQ ID NO: 18219 - RNA, 37 nt, Artificial Sequence
  Description of Artificial Sequence:  Enzymatic Nucleic Acid
gugucugggccgaaaggcgagugaggucucugcuugc

SEQ ID NO: 18220 - RNA, 37 nt, Artificial Sequence
  Description of Artificial Sequence:  Enzymatic Nucleic Acid
uggagauggccgaaaggcgagugaggucuagugucug

SEQ ID NO: 18221 - RNA, 37 nt, Artificial Sequence
  Description of Artificial Sequence:  Enzymatic Nucleic Acid
ccccccuggccgaaaggcgagugaggucuauuggaga

SEQ ID NO: 18222 - RNA, 37 nt, Artificial Sequence
  Description of Artificial Sequence:  Enzymatic Nucleic Acid
augggcuggccgaaaggcgagugaggucuuucccccc

SEQ ID NO: 18223 - RNA, 37 nt, Artificial Sequence
  Description of Artificial Sequence:  Enzymatic Nucleic Acid
uuuauggggccgaaaggcgagugaggucuugcuuccc

SEQ ID NO: 18224 - RNA, 37 nt, Artificial Sequence
  Description of Artificial Sequence:  Enzymatic Nucleic Acid
ggcaaagagccgaaaggcgagugaggucucauuuaug

SEQ ID NO: 18225 - RNA, 37 nt, Artificial Sequence
  Description of Artificial Sequence:  Enzymatic Nucleic Acid
auuucagggccgaaaggcgagugaggucuaaagacca

SEQ ID NO: 18226 - RNA, 37 nt, Artificial Sequence
  Description of Artificial Sequence:  Enzymatic Nucleic Acid
cuuacucagccgaaaggcgagugaggucucauuucag

SEQ ID NO: 18227 - RNA, 37 nt, Artificial Sequence
  Description of Artificial Sequence:  Enzymatic Nucleic Acid
uuuccuuagccgaaaggcgagugaggucuucaccauu

SEQ ID NO: 18228 - RNA, 37 nt, Artificial Sequence
  Description of Artificial Sequence:  Enzymatic Nucleic Acid
gccuuucggccgaaaggcgagugaggucuuuuccuua

SEQ ID NO: 18229 - RNA, 37 nt, Artificial Sequence
  Description of Artificial Sequence:  Enzymatic Nucleic Acid
augcucaggccgaaaggcgagugaggucucuuucgcu

SEQ ID NO: 18230 - RNA, 37 nt, Artificial Sequence
  Description of Artificial Sequence:  Enzymatic Nucleic Acid
uaguuauggccgaaaggcgagugaggucuucagccuu

SEQ ID NO: 18231 - RNA, 37 nt, Artificial Sequence
  Description of Artificial Sequence:  Enzymatic Nucleic Acid
uccacagggccgaaaggcgagugaggucuagauuuag

SEQ ID NO: 18232 - RNA, 37 nt, Artificial Sequence
  Description of Artificial Sequence:  Enzymatic Nucleic Acid
uucuuccagccgaaaggcgagugaggucuaggcagau

SEQ ID NO: 18233 - RNA, 37 nt, Artificial Sequence
  Description of Artificial Sequence:  Enzymatic Nucleic Acid
auuguuuggccgaaaggcgagugaggucucauuucuu

SEQ ID NO: 18234 - RNA, 37 nt, Artificial Sequence
  Description of Artificial Sequence:  Enzymatic Nucleic Acid
aaguacuggccgaaaggcgagugaggucuagaauugu

SEQ ID NO: 18235 - RNA, 37 nt, Artificial Sequence
  Description of Artificial Sequence:  Enzymatic Nucleic Acid
uuaaaguagccgaaaggcgagugaggucuugcagaau

SEQ ID NO: 18236 - RNA, 37 nt, Artificial Sequence
  Description of Artificial Sequence:  Enzymatic Nucleic Acid
ugcuugaggccgaaaggcgagugaggucuuguguuca

SEQ ID NO: 18237 - RNA, 37 nt, Artificial Sequence
  Description of Artificial Sequence:  Enzymatic Nucleic Acid
gugguuuggccgaaaggcgagugaggucuuugagcug

SEQ ID NO: 18238 - RNA, 37 nt, Artificial Sequence
  Description of Artificial Sequence:  Enzymatic Nucleic Acid
uguagaaggccgaaaggcgagugaggucucagugugg

SEQ ID NO: 18239 - RNA, 37 nt, Artificial Sequence
  Description of Artificial Sequence:  Enzymatic Nucleic Acid
auuugcaggccgaaaggcgagugaggucuuguagaag

SEQ ID NO: 18240 - RNA, 37 nt, Artificial Sequence
  Description of Artificial Sequence:  Enzymatic Nucleic Acid
gauauuuggccgaaaggcgagugaggucuagcuguag

SEQ ID NO: 18241 - RNA, 37 nt, Artificial Sequence
  Description of Artificial Sequence:  Enzymatic Nucleic Acid
agguacaggccgaaaggcgagugaggucuuagauauu

SEQ ID NO: 18242 - RNA, 37 nt, Artificial Sequence
  Description of Artificial Sequence:  Enzymatic Nucleic Acid
aguagguagccgaaaggcgagugaggucuagcuagau

SEQ ID NO: 18243 - RNA, 37 nt, Artificial Sequence
  Description of Artificial Sequence:  Enzymatic Nucleic Acid
auagauuggccgaaaggcgagugaggucuagauucug

SEQ ID NO: 18244 - RNA, 37 nt, Artificial Sequence
  Description of Artificial Sequence:  Enzymatic Nucleic Acid
cuguaucagccgaaaggcgagugaggucuuaauaaau

SEQ ID NO: 18245 - RNA, 37 nt, Artificial Sequence
  Description of Artificial Sequence:  Enzymatic Nucleic Acid
aaggucuagccgaaaggcgagugaggucucuguauca

SEQ ID NO: 18246 - RNA, 37 nt, Artificial Sequence
  Description of Artificial Sequence:  Enzymatic Nucleic Acid
caucucuagccgaaaggcgagugaggucugaaagguc

SEQ ID NO: 18247 - RNA, 37 nt, Artificial Sequence
  Description of Artificial Sequence:  Enzymatic Nucleic Acid
ucacuguagccgaaaggcgagugaggucuaucucuac

SEQ ID NO: 18248 - RNA, 37 nt, Artificial Sequence
  Description of Artificial Sequence:  Enzymatic Nucleic Acid
ggauuucagccgaaaggcgagugaggucuuguacauc

SEQ ID NO: 18249 - RNA, 37 nt, Artificial Sequence
  Description of Artificial Sequence:  Enzymatic Nucleic Acid
augacgaggccgaaaggcgagugaggucuucccuucc

SEQ ID NO: 18250 - RNA, 37 nt, Artificial Sequence
  Description of Artificial Sequence:  Enzymatic Nucleic Acid
gggaaugagccgaaaggcgagugaggucugagcuccc

SEQ ID NO: 18251 - RNA, 37 nt, Artificial Sequence
  Description of Artificial Sequence:  Enzymatic Nucleic Acid
uaacccgggccgaaaggcgagugaggucuagggaaug

SEQ ID NO: 18252 - RNA, 37 nt, Artificial Sequence
  Description of Artificial Sequence:  Enzymatic Nucleic Acid
ugacguaagccgaaaggcgagugaggucuccggcagg

SEQ ID NO: 18253 - RNA, 37 nt, Artificial Sequence
  Description of Artificial Sequence:  Enzymatic Nucleic Acid
uuaggugagccgaaaggcgagugaggucuguaacccg

SEQ ID NO: 18254 - RNA, 37 nt, Artificial Sequence
  Description of Artificial Sequence:  Enzymatic Nucleic Acid
uaaaguaagccgaaaggcgagugaggucuagugaugu

SEQ ID NO: 18255 - RNA, 37 nt, Artificial Sequence
  Description of Artificial Sequence:  Enzymatic Nucleic Acid
aguggaaagccgaaaggcgagugaggucuuuuuuuaa

SEQ ID NO: 18256 - RNA, 37 nt, Artificial Sequence
  Description of Artificial Sequence:  Enzymatic Nucleic Acid
agauuauggccgaaaggcgagugaggucuguuuucca

SEQ ID NO: 18257 - RNA, 37 nt, Artificial Sequence
  Description of Artificial Sequence:  Enzymatic Nucleic Acid
ccuuucuagccgaaaggcgagugaggucuugucccag

SEQ ID NO: 18258 - RNA, 37 nt, Artificial Sequence
  Description of Artificial Sequence:  Enzymatic Nucleic Acid
ugaugaaggccgaaaggcgagugaggucuccuuucua

SEQ ID NO: 18259 - RNA, 37 nt, Artificial Sequence
  Description of Artificial Sequence:  Enzymatic Nucleic Acid
guacguuggccgaaaggcgagugaggucuauuugaua

SEQ ID NO: 18260 - RNA, 37 nt, Artificial Sequence
  Description of Artificial Sequence:  Enzymatic Nucleic Acid
ucuuuguagccgaaaggcgagugaggucuguugcauu

SEQ ID NO: 18261 - RNA, 37 nt, Artificial Sequence
  Description of Artificial Sequence:  Enzymatic Nucleic Acid
gucagaaggccgaaaggcgagugaggucuccuauuuc

SEQ ID NO: 18262 - RNA, 37 nt, Artificial Sequence
  Description of Artificial Sequence:  Enzymatic Nucleic Acid
uugcuucagccgaaaggcgagugaggucuaggucaga

SEQ ID NO: 18263 - RNA, 37 nt, Artificial Sequence
  Description of Artificial Sequence:  Enzymatic Nucleic Acid
gacuguuggccgaaaggcgagugaggucuuucacagg

SEQ ID NO: 18264 - RNA, 37 nt, Artificial Sequence
  Description of Artificial Sequence:  Enzymatic Nucleic Acid
cccauugagccgaaaggcgagugaggucuuguugcuu

SEQ ID NO: 18265 - RNA, 37 nt, Artificial Sequence
  Description of Artificial Sequence:  Enzymatic Nucleic Acid
uacaaauggccgaaaggcgagugaggucuccauugac

SEQ ID NO: 18266 - RNA, 37 nt, Artificial Sequence
  Description of Artificial Sequence:  Enzymatic Nucleic Acid
gucuuauagccgaaaggcgagugaggucuaaaugccc

SEQ ID NO: 18267 - RNA, 37 nt, Artificial Sequence
  Description of Artificial Sequence:  Enzymatic Nucleic Acid
uauuuggagccgaaaggcgagugaggucuaucuauga

SEQ ID NO: 18268 - RNA, 37 nt, Artificial Sequence
  Description of Artificial Sequence:  Enzymatic Nucleic Acid
gugguguggccgaaaggcgagugaggucuuuauuugg

SEQ ID NO: 18269 - RNA, 37 nt, Artificial Sequence
  Description of Artificial Sequence:  Enzymatic Nucleic Acid
ugacuggggccgaaaggcgagugaggucuguggugug

SEQ ID NO: 18270 - RNA, 37 nt, Artificial Sequence
  Description of Artificial Sequence:  Enzymatic Nucleic Acid
uaauuugagccgaaaggcgagugaggucuugggcgug

SEQ ID NO: 18271 - RNA, 37 nt, Artificial Sequence
  Description of Artificial Sequence:  Enzymatic Nucleic Acid
gaguaugggccgaaaggcgagugaggucucucuaagu

SEQ ID NO: 18272 - RNA, 37 nt, Artificial Sequence
  Description of Artificial Sequence:  Enzymatic Nucleic Acid
auugaggagccgaaaggcgagugaggucuaagaguau

SEQ ID NO: 18273 - RNA, 37 nt, Artificial Sequence
  Description of Artificial Sequence:  Enzymatic Nucleic Acid
uagcaguagccgaaaggcgagugaggucuaauugagg

SEQ ID NO: 18274 - RNA, 37 nt, Artificial Sequence
  Description of Artificial Sequence:  Enzymatic Nucleic Acid
agugguaggccgaaaggcgagugaggucuaguacaau

SEQ ID NO: 18275 - RNA, 37 nt, Artificial Sequence
  Description of Artificial Sequence:  Enzymatic Nucleic Acid
cauuugaagccgaaaggcgagugaggucuucucgugu

SEQ ID NO: 18276 - RNA, 37 nt, Artificial Sequence
  Description of Artificial Sequence:  Enzymatic Nucleic Acid
caggguaagccgaaaggcgagugaggucuuccagguc

SEQ ID NO: 18277 - RNA, 37 nt, Artificial Sequence
  Description of Artificial Sequence:  Enzymatic Nucleic Acid
uacggaaggccgaaaggcgagugaggucuucucuuau

SEQ ID NO: 18278 - RNA, 37 nt, Artificial Sequence
  Description of Artificial Sequence:  Enzymatic Nucleic Acid
ucgccuuagccgaaaggcgagugaggucuggaagcuc

SEQ ID NO: 18279 - RNA, 37 nt, Artificial Sequence
  Description of Artificial Sequence:  Enzymatic Nucleic Acid
auucgucggccgaaaggcgagugaggucucuuacgga

SEQ ID NO: 18280 - RNA, 37 nt, Artificial Sequence
  Description of Artificial Sequence:  Enzymatic Nucleic Acid
gggaauuggccgaaaggcgagugaggucuuuugguca

SEQ ID NO: 18281 - RNA, 37 nt, Artificial Sequence
  Description of Artificial Sequence:  Enzymatic Nucleic Acid
uauguugggccgaaaggcgagugaggucuaugggaau

SEQ ID NO: 18282 - RNA, 37 nt, Artificial Sequence
  Description of Artificial Sequence:  Enzymatic Nucleic Acid
uaagaacagccgaaaggcgagugaggucuuguagaau

SEQ ID NO: 18283 - RNA, 37 nt, Artificial Sequence
  Description of Artificial Sequence:  Enzymatic Nucleic Acid
aguaagaagccgaaaggcgagugaggucuacuguaga

SEQ ID NO: 18284 - RNA, 37 nt, Artificial Sequence
  Description of Artificial Sequence:  Enzymatic Nucleic Acid
uuguucuggccgaaaggcgagugaggucuauuuuguc

SEQ ID NO: 18285 - RNA, 37 nt, Artificial Sequence
  Description of Artificial Sequence:  Enzymatic Nucleic Acid
uuacacgagccgaaaggcgagugaggucuaaguauaa

SEQ ID NO: 18286 - RNA, 37 nt, Artificial Sequence
  Description of Artificial Sequence:  Enzymatic Nucleic Acid
uccuuacagccgaaaggcgagugaggucugacaagua

SEQ ID NO: 18287 - RNA, 37 nt, Artificial Sequence
  Description of Artificial Sequence:  Enzymatic Nucleic Acid
acuccuuagccgaaaggcgagugaggucuacgacaag

SEQ ID NO: 18288 - RNA, 37 nt, Artificial Sequence
  Description of Artificial Sequence:  Enzymatic Nucleic Acid
augguccagccgaaaggcgagugaggucuuccuuaca

SEQ ID NO: 18289 - RNA, 37 nt, Artificial Sequence
  Description of Artificial Sequence:  Enzymatic Nucleic Acid
gguguuaagccgaaaggcgagugaggucuagauuuga

SEQ ID NO: 18290 - RNA, 37 nt, Artificial Sequence
  Description of Artificial Sequence:  Enzymatic Nucleic Acid
uauaugcagccgaaaggcgagugaggucuugaggugu

SEQ ID NO: 18291 - RNA, 37 nt, Artificial Sequence
  Description of Artificial Sequence:  Enzymatic Nucleic Acid
uauauauggccgaaaggcgagugaggucuacugaggu

SEQ ID NO: 18292 - RNA, 37 nt, Artificial Sequence
  Description of Artificial Sequence:  Enzymatic Nucleic Acid
gaugaauggccgaaaggcgagugaggucuuuuaucau

SEQ ID NO: 18293 - RNA, 37 nt, Artificial Sequence
  Description of Artificial Sequence:  Enzymatic Nucleic Acid
auguuucagccgaaaggcgagugaggucuagugauga

SEQ ID NO: 18294 - RNA, 37 nt, Artificial Sequence
  Description of Artificial Sequence:  Enzymatic Nucleic Acid
agcaccuggccgaaaggcgagugaggucuuguuuucg

SEQ ID NO: 18295 - RNA, 37 nt, Artificial Sequence
  Description of Artificial Sequence:  Enzymatic Nucleic Acid
uucaagcagccgaaaggcgagugaggucucugcuguu

SEQ ID NO: 18296 - RNA, 37 nt, Artificial Sequence
  Description of Artificial Sequence:  Enzymatic Nucleic Acid
guuucaaggccgaaaggcgagugaggucuaccugcug

SEQ ID NO: 18297 - RNA, 37 nt, Artificial Sequence
  Description of Artificial Sequence:  Enzymatic Nucleic Acid
gccagcuagccgaaaggcgagugaggucugguuucaa

SEQ ID NO: 18298 - RNA, 37 nt, Artificial Sequence
  Description of Artificial Sequence:  Enzymatic Nucleic Acid
cuugccaggccgaaaggcgagugaggucuuacgguuu

SEQ ID NO: 18299 - RNA, 37 nt, Artificial Sequence
  Description of Artificial Sequence:  Enzymatic Nucleic Acid
accgcuuggccgaaaggcgagugaggucucagcuacg

SEQ ID NO: 18300 - RNA, 37 nt, Artificial Sequence
  Description of Artificial Sequence:  Enzymatic Nucleic Acid
uaagaccggccgaaaggcgagugaggucuuugccagc

SEQ ID NO: 18301 - RNA, 37 nt, Artificial Sequence
  Description of Artificial Sequence:  Enzymatic Nucleic Acid
cgguaagagccgaaaggcgagugaggucucgcuugcc

SEQ ID NO: 18302 - RNA, 37 nt, Artificial Sequence
  Description of Artificial Sequence:  Enzymatic Nucleic Acid
auagagaggccgaaaggcgagugaggucucgguaaga

SEQ ID NO: 18303 - RNA, 37 nt, Artificial Sequence
  Description of Artificial Sequence:  Enzymatic Nucleic Acid
ugccuucagccgaaaggcgagugaggucuuuucauag

SEQ ID NO: 18304 - RNA, 37 nt, Artificial Sequence
  Description of Artificial Sequence:  Enzymatic Nucleic Acid
gggaaauggccgaaaggcgagugaggucucuucacuu

SEQ ID NO: 18305 - RNA, 37 nt, Artificial Sequence
  Description of Artificial Sequence:  Enzymatic Nucleic Acid
acuuccgggccgaaaggcgagugaggucugagggaaa

SEQ ID NO: 18306 - RNA, 37 nt, Artificial Sequence
  Description of Artificial Sequence:  Enzymatic Nucleic Acid
ccauacaagccgaaaggcgagugaggucuuuccggcg

SEQ ID NO: 18307 - RNA, 37 nt, Artificial Sequence
  Description of Artificial Sequence:  Enzymatic Nucleic Acid
uaaccauagccgaaaggcgagugaggucuaacuuccg

SEQ ID NO: 18308 - RNA, 37 nt, Artificial Sequence
  Description of Artificial Sequence:  Enzymatic Nucleic Acid
ucuuuuaagccgaaaggcgagugaggucucauacaac

SEQ ID NO: 18309 - RNA, 37 nt, Artificial Sequence
  Description of Artificial Sequence:  Enzymatic Nucleic Acid
gcagguaagccgaaaggcgagugaggucuccaucuuu

SEQ ID NO: 18310 - RNA, 37 nt, Artificial Sequence
  Description of Artificial Sequence:  Enzymatic Nucleic Acid
cucagucggccgaaaggcgagugaggucuagguaacc

SEQ ID NO: 18311 - RNA, 37 nt, Artificial Sequence
  Description of Artificial Sequence:  Enzymatic Nucleic Acid
auagcgaggccgaaaggcgagugaggucuagauuucu

SEQ ID NO: 18312 - RNA, 37 nt, Artificial Sequence
  Description of Artificial Sequence:  Enzymatic Nucleic Acid
ucaaauaggccgaaaggcgagugaggucugagcagau

SEQ ID NO: 18313 - RNA, 37 nt, Artificial Sequence
  Description of Artificial Sequence:  Enzymatic Nucleic Acid
aguagccagccgaaaggcgagugaggucugagucaaa

SEQ ID NO: 18314 - RNA, 37 nt, Artificial Sequence
  Description of Artificial Sequence:  Enzymatic Nucleic Acid
acgaguaggccgaaaggcgagugaggucucacgaguc

SEQ ID NO: 18315 - RNA, 37 nt, Artificial Sequence
  Description of Artificial Sequence:  Enzymatic Nucleic Acid
auaauuaagccgaaaggcgagugaggucugaguagcc

SEQ ID NO: 18316 - RNA, 37 nt, Artificial Sequence
  Description of Artificial Sequence:  Enzymatic Nucleic Acid
uucaguuagccgaaaggcgagugaggucuguccuuga

SEQ ID NO: 18317 - RNA, 37 nt, Artificial Sequence
  Description of Artificial Sequence:  Enzymatic Nucleic Acid
auucccuggccgaaaggcgagugaggucuauccucuu

SEQ ID NO: 18318 - RNA, 37 nt, Artificial Sequence
  Description of Artificial Sequence:  Enzymatic Nucleic Acid
augcucaggccgaaaggcgagugaggucuaagauugu

SEQ ID NO: 18319 - RNA, 37 nt, Artificial Sequence
  Description of Artificial Sequence:  Enzymatic Nucleic Acid
guuuuauggccgaaaggcgagugaggucuucagcaag

SEQ ID NO: 18320 - RNA, 37 nt, Artificial Sequence
  Description of Artificial Sequence:  Enzymatic Nucleic Acid
acauuugagccgaaaggcgagugaggucuuguuuuau

SEQ ID NO: 18321 - RNA, 37 nt, Artificial Sequence
  Description of Artificial Sequence:  Enzymatic Nucleic Acid
uuuaaacagccgaaaggcgagugaggucuauuugacu

SEQ ID NO: 18322 - RNA, 37 nt, Artificial Sequence
  Description of Artificial Sequence:  Enzymatic Nucleic Acid
uuuuuaaagccgaaaggcgagugaggucuacauuuga

SEQ ID NO: 18323 - RNA, 37 nt, Artificial Sequence
  Description of Artificial Sequence:  Enzymatic Nucleic Acid
uagagugggccgaaaggcgagugaggucuagugaggu

SEQ ID NO: 18324 - RNA, 37 nt, Artificial Sequence
  Description of Artificial Sequence:  Enzymatic Nucleic Acid
cacauugagccgaaaggcgagugaggucuaauuagag

SEQ ID NO: 18325 - RNA, 37 nt, Artificial Sequence
  Description of Artificial Sequence:  Enzymatic Nucleic Acid
ggguuucagccgaaaggcgagugaggucuauugacaa

SEQ ID NO: 18326 - RNA, 37 nt, Artificial Sequence
  Description of Artificial Sequence:  Enzymatic Nucleic Acid
ugacacgggccgaaaggcgagugaggucucuuuucgu

SEQ ID NO: 18327 - RNA, 37 nt, Artificial Sequence
  Description of Artificial Sequence:  Enzymatic Nucleic Acid
cgaugacagccgaaaggcgagugaggucuggccuuuu

SEQ ID NO: 18328 - RNA, 37 nt, Artificial Sequence
  Description of Artificial Sequence:  Enzymatic Nucleic Acid
aacgaugagccgaaaggcgagugaggucuacggccuu

SEQ ID NO: 18329 - RNA, 37 nt, Artificial Sequence
  Description of Artificial Sequence:  Enzymatic Nucleic Acid
ucuggaaagccgaaaggcgagugaggucugaugacac

SEQ ID NO: 18330 - RNA, 37 nt, Artificial Sequence
  Description of Artificial Sequence:  Enzymatic Nucleic Acid
guagagaggccgaaaggcgagugaggucucgggucug

SEQ ID NO: 18331 - RNA, 37 nt, Artificial Sequence
  Description of Artificial Sequence:  Enzymatic Nucleic Acid
gucugcuggccgaaaggcgagugaggucuccaguggg

SEQ ID NO: 18332 - RNA, 37 nt, Artificial Sequence
  Description of Artificial Sequence:  Enzymatic Nucleic Acid
uuugucuggccgaaaggcgagugaggucuugcccagu

SEQ ID NO: 18333 - RNA, 37 nt, Artificial Sequence
  Description of Artificial Sequence:  Enzymatic Nucleic Acid
augcgguagccgaaaggcgagugaggucuaagucagg

SEQ ID NO: 18334 - RNA, 37 nt, Artificial Sequence
  Description of Artificial Sequence:  Enzymatic Nucleic Acid
accauauggccgaaaggcgagugaggucugguacaag

SEQ ID NO: 18335 - RNA, 37 nt, Artificial Sequence
  Description of Artificial Sequence:  Enzymatic Nucleic Acid
gagggauagccgaaaggcgagugaggucucauaugcg

SEQ ID NO: 18336 - RNA, 37 nt, Artificial Sequence
  Description of Artificial Sequence:  Enzymatic Nucleic Acid
cagaaccagccgaaaggcgagugaggucuuugauugu

SEQ ID NO: 18337 - RNA, 37 nt, Artificial Sequence
  Description of Artificial Sequence:  Enzymatic Nucleic Acid
ugccagaagccgaaaggcgagugaggucucacuugau

SEQ ID NO: 18338 - RNA, 37 nt, Artificial Sequence
  Description of Artificial Sequence:  Enzymatic Nucleic Acid
cagggguggccgaaaggcgagugaggucucagaacca

SEQ ID NO: 18339 - RNA, 37 nt, Artificial Sequence
  Description of Artificial Sequence:  Enzymatic Nucleic Acid
uaugguuagccgaaaggcgagugaggucuaggggugc

SEQ ID NO: 18340 - RNA, 37 nt, Artificial Sequence
  Description of Artificial Sequence:  Enzymatic Nucleic Acid
acaccuuggccgaaaggcgagugaggucuuucggaau

SEQ ID NO: 18341 - RNA, 37 nt, Artificial Sequence
  Description of Artificial Sequence:  Enzymatic Nucleic Acid
aagucacagccgaaaggcgagugaggucucuugcuuc

SEQ ID NO: 18342 - RNA, 37 nt, Artificial Sequence
  Description of Artificial Sequence:  Enzymatic Nucleic Acid
aaaagucagccgaaaggcgagugaggucuaccuugcu

SEQ ID NO: 18343 - RNA, 37 nt, Artificial Sequence
  Description of Artificial Sequence:  Enzymatic Nucleic Acid
uauuggaagccgaaaggcgagugaggucuaaaaguca

SEQ ID NO: 18344 - RNA, 37 nt, Artificial Sequence
  Description of Artificial Sequence:  Enzymatic Nucleic Acid
auaaaggagccgaaaggcgagugaggucuucuucauu

SEQ ID NO: 18345 - RNA, 37 nt, Artificial Sequence
  Description of Artificial Sequence:  Enzymatic Nucleic Acid
gcugucaggccgaaaggcgagugaggucuauccagga

SEQ ID NO: 18346 - RNA, 37 nt, Artificial Sequence
  Description of Artificial Sequence:  Enzymatic Nucleic Acid
ccauguuggccgaaaggcgagugaggucuugucagca

SEQ ID NO: 18347 - RNA, 37 nt, Artificial Sequence
  Description of Artificial Sequence:  Enzymatic Nucleic Acid
gagugauggccgaaaggcgagugaggucuucucaauu

SEQ ID NO: 18348 - RNA, 37 nt, Artificial Sequence
  Description of Artificial Sequence:  Enzymatic Nucleic Acid
gccaugcggccgaaaggcgagugaggucuugagugau

SEQ ID NO: 18349 - RNA, 37 nt, Artificial Sequence
  Description of Artificial Sequence:  Enzymatic Nucleic Acid
uugccauggccgaaaggcgagugaggucugcugagug

SEQ ID NO: 18350 - RNA, 37 nt, Artificial Sequence
  Description of Artificial Sequence:  Enzymatic Nucleic Acid
uauuauuggccgaaaggcgagugaggucucaugcgcu

SEQ ID NO: 18351 - RNA, 37 nt, Artificial Sequence
  Description of Artificial Sequence:  Enzymatic Nucleic Acid
ggugcuaggccgaaaggcgagugaggucucaucuuau

SEQ ID NO: 18352 - RNA, 37 nt, Artificial Sequence
  Description of Artificial Sequence:  Enzymatic Nucleic Acid
ccaagguggccgaaaggcgagugaggucuuagccauc

SEQ ID NO: 18353 - RNA, 37 nt, Artificial Sequence
  Description of Artificial Sequence:  Enzymatic Nucleic Acid
agccacaagccgaaaggcgagugaggucucaaggugc

SEQ ID NO: 18354 - RNA, 37 nt, Artificial Sequence
  Description of Artificial Sequence:  Enzymatic Nucleic Acid
gucagccagccgaaaggcgagugaggucuaaccaagg

SEQ ID NO: 18355 - RNA, 37 nt, Artificial Sequence
  Description of Artificial Sequence:  Enzymatic Nucleic Acid
agagucaggccgaaaggcgagugaggucucacaacca

SEQ ID NO: 18356 - RNA, 37 nt, Artificial Sequence
  Description of Artificial Sequence:  Enzymatic Nucleic Acid
aagcuauggccgaaaggcgagugaggucuaaauguag

SEQ ID NO: 18357 - RNA, 37 nt, Artificial Sequence
  Description of Artificial Sequence:  Enzymatic Nucleic Acid
auuggaaggccgaaaggcgagugaggucuuaugcaaa

SEQ ID NO: 18358 - RNA, 37 nt, Artificial Sequence
  Description of Artificial Sequence:  Enzymatic Nucleic Acid
agucccaagccgaaaggcgagugaggucuuuuauugg

SEQ ID NO: 18359 - RNA, 37 nt, Artificial Sequence
  Description of Artificial Sequence:  Enzymatic Nucleic Acid
ucuucccagccgaaaggcgagugaggucuagucccaa

SEQ ID NO: 18360 - RNA, 37 nt, Artificial Sequence
  Description of Artificial Sequence:  Enzymatic Nucleic Acid
uauaaaaggccgaaaggcgagugaggucuuuauguuu

SEQ ID NO: 18361 - RNA, 37 nt, Artificial Sequence
  Description of Artificial Sequence:  Enzymatic Nucleic Acid
auuuggcagccgaaaggcgagugaggucuaucuguga

SEQ ID NO: 18362 - RNA, 37 nt, Artificial Sequence
  Description of Artificial Sequence:  Enzymatic Nucleic Acid
ccauuugggccgaaaggcgagugaggucuacaucugu

SEQ ID NO: 18363 - RNA, 37 nt, Artificial Sequence
  Description of Artificial Sequence:  Enzymatic Nucleic Acid
acaugaaagccgaaaggcgagugaggucuccauuugg

SEQ ID NO: 18364 - RNA, 37 nt, Artificial Sequence
  Description of Artificial Sequence:  Enzymatic Nucleic Acid
caaguuaagccgaaaggcgagugaggucuaugaaacc

SEQ ID NO: 18365 - RNA, 37 nt, Artificial Sequence
  Description of Artificial Sequence:  Enzymatic Nucleic Acid
uccgucgggccgaaaggcgagugaggucuauuuuuuc

SEQ ID NO: 18366 - RNA, 37 nt, Artificial Sequence
  Description of Artificial Sequence:  Enzymatic Nucleic Acid
gugcaagagccgaaaggcgagugaggucuaguuucag

SEQ ID NO: 18367 - RNA, 37 nt, Artificial Sequence
  Description of Artificial Sequence:  Enzymatic Nucleic Acid
uaacuguggccgaaaggcgagugaggucuaagacagu

SEQ ID NO: 18368 - RNA, 37 nt, Artificial Sequence
  Description of Artificial Sequence:  Enzymatic Nucleic Acid
cuuguuaagccgaaaggcgagugaggucuugugcaag

SEQ ID NO: 18369 - RNA, 37 nt, Artificial Sequence
  Description of Artificial Sequence:  Enzymatic Nucleic Acid
uauaagaagccgaaaggcgagugaggucuuuguuaac

SEQ ID NO: 18370 - RNA, 37 nt, Artificial Sequence
  Description of Artificial Sequence:  Enzymatic Nucleic Acid
ccaaguaagccgaaaggcgagugaggucugucucugu

SEQ ID NO: 18371 - RNA, 37 nt, Artificial Sequence
  Description of Artificial Sequence:  Enzymatic Nucleic Acid
acuguccggccgaaaggcgagugaggucuaguaaaau

SEQ ID NO: 18372 - RNA, 37 nt, Artificial Sequence
  Description of Artificial Sequence:  Enzymatic Nucleic Acid
guuauuaagccgaaaggcgagugaggucuuguccgca

SEQ ID NO: 18373 - RNA, 37 nt, Artificial Sequence
  Description of Artificial Sequence:  Enzymatic Nucleic Acid
cuguaguggccgaaaggcgagugaggucuauuguucu

SEQ ID NO: 18374 - RNA, 37 nt, Artificial Sequence
  Description of Artificial Sequence:  Enzymatic Nucleic Acid
ugcuaauagccgaaaggcgagugaggucuuguagugc

SEQ ID NO: 18375 - RNA, 37 nt, Artificial Sequence
  Description of Artificial Sequence:  Enzymatic Nucleic Acid
uuugcuuggccgaaaggcgagugaggucuuaauacug

SEQ ID NO: 18376 - RNA, 37 nt, Artificial Sequence
  Description of Artificial Sequence:  Enzymatic Nucleic Acid
auuuuuuggccgaaaggcgagugaggucuuugcuaau

SEQ ID NO: 18377 - RNA, 37 nt, Artificial Sequence
  Description of Artificial Sequence:  Enzymatic Nucleic Acid
agugaugggccgaaaggcgagugaggucucauuuuuu

SEQ ID NO: 18378 - RNA, 37 nt, Artificial Sequence
  Description of Artificial Sequence:  Enzymatic Nucleic Acid
auggaguggccgaaaggcgagugaggucuuccuuagu

SEQ ID NO: 18379 - RNA, 37 nt, Artificial Sequence
  Description of Artificial Sequence:  Enzymatic Nucleic Acid
cagggaaagccgaaaggcgagugaggucuauucauga

SEQ ID NO: 18380 - RNA, 37 nt, Artificial Sequence
  Description of Artificial Sequence:  Enzymatic Nucleic Acid
gaaucuuggccgaaaggcgagugaggucuagggaaac

SEQ ID NO: 18381 - RNA, 37 nt, Artificial Sequence
  Description of Artificial Sequence:  Enzymatic Nucleic Acid
cauagguggccgaaaggcgagugaggucucugaaucu

SEQ ID NO: 18382 - RNA, 37 nt, Artificial Sequence
  Description of Artificial Sequence:  Enzymatic Nucleic Acid
ucugcagggccgaaaggcgagugaggucuauaggugc

SEQ ID NO: 18383 - RNA, 37 nt, Artificial Sequence
  Description of Artificial Sequence:  Enzymatic Nucleic Acid
uggcucuggccgaaaggcgagugaggucuaggcauag

SEQ ID NO: 18384 - RNA, 37 nt, Artificial Sequence
  Description of Artificial Sequence:  Enzymatic Nucleic Acid
auuccugggccgaaaggcgagugaggucuucugcagg

SEQ ID NO: 18385 - RNA, 37 nt, Artificial Sequence
  Description of Artificial Sequence:  Enzymatic Nucleic Acid
uguguauagccgaaaggcgagugaggucuauuccugg

SEQ ID NO: 18386 - RNA, 37 nt, Artificial Sequence
  Description of Artificial Sequence:  Enzymatic Nucleic Acid
guaugguggccgaaaggcgagugaggucuuuccugau

SEQ ID NO: 18387 - RNA, 37 nt, Artificial Sequence
  Description of Artificial Sequence:  Enzymatic Nucleic Acid
agguuucggccgaaaggcgagugaggucuaggaggua

SEQ ID NO: 18388 - RNA, 37 nt, Artificial Sequence
  Description of Artificial Sequence:  Enzymatic Nucleic Acid
ugugaucagccgaaaggcgagugaggucuugagguuu

SEQ ID NO: 18389 - RNA, 37 nt, Artificial Sequence
  Description of Artificial Sequence:  Enzymatic Nucleic Acid
gauggccagccgaaaggcgagugaggucuugugugau

SEQ ID NO: 18390 - RNA, 37 nt, Artificial Sequence
  Description of Artificial Sequence:  Enzymatic Nucleic Acid
gcugaugggccgaaaggcgagugaggucucacugugu

SEQ ID NO: 18391 - RNA, 37 nt, Artificial Sequence
  Description of Artificial Sequence:  Enzymatic Nucleic Acid
uggaacuggccgaaaggcgagugaggucuugauggcc

SEQ ID NO: 18392 - RNA, 37 nt, Artificial Sequence
  Description of Artificial Sequence:  Enzymatic Nucleic Acid
ugguggaagccgaaaggcgagugaggucuugcugaug

SEQ ID NO: 18393 - RNA, 37 nt, Artificial Sequence
  Description of Artificial Sequence:  Enzymatic Nucleic Acid
uagcaugagccgaaaggcgagugaggucuagucuaaa

SEQ ID NO: 18394 - RNA, 37 nt, Artificial Sequence
  Description of Artificial Sequence:  Enzymatic Nucleic Acid
accauuaggccgaaaggcgagugaggucuaugacagu

SEQ ID NO: 18395 - RNA, 37 nt, Artificial Sequence
  Description of Artificial Sequence:  Enzymatic Nucleic Acid
cggggacagccgaaaggcgagugaggucucauuagca

SEQ ID NO: 18396 - RNA, 37 nt, Artificial Sequence
  Description of Artificial Sequence:  Enzymatic Nucleic Acid
cucggggagccgaaaggcgagugaggucuaccauuag

SEQ ID NO: 18397 - RNA, 37 nt, Artificial Sequence
  Description of Artificial Sequence:  Enzymatic Nucleic Acid
aucugagggccgaaaggcgagugaggucuucggggac

SEQ ID NO: 18398 - RNA, 37 nt, Artificial Sequence
  Description of Artificial Sequence:  Enzymatic Nucleic Acid
uuuuuaaagccgaaaggcgagugaggucucaagugau

SEQ ID NO: 18399 - RNA, 37 nt, Artificial Sequence
  Description of Artificial Sequence:  Enzymatic Nucleic Acid
auuccagggccgaaaggcgagugaggucuucuuguug

SEQ ID NO: 18400 - RNA, 37 nt, Artificial Sequence
  Description of Artificial Sequence:  Enzymatic Nucleic Acid
gcgugcuggccgaaaggcgagugaggucuuuccuggu

SEQ ID NO: 18401 - RNA, 37 nt, Artificial Sequence
  Description of Artificial Sequence:  Enzymatic Nucleic Acid
acagcguggccgaaaggcgagugaggucuugcuuccu

SEQ ID NO: 18402 - RNA, 37 nt, Artificial Sequence
  Description of Artificial Sequence:  Enzymatic Nucleic Acid
auaaacaggccgaaaggcgagugaggucugugcugcu

SEQ ID NO: 18403 - RNA, 37 nt, Artificial Sequence
  Description of Artificial Sequence:  Enzymatic Nucleic Acid
ucaauaaagccgaaaggcgagugaggucuagcgugcu

SEQ ID NO: 18404 - RNA, 37 nt, Artificial Sequence
  Description of Artificial Sequence:  Enzymatic Nucleic Acid
uucugugagccgaaaggcgagugaggucuucuuucaa

SEQ ID NO: 18405 - RNA, 37 nt, Artificial Sequence
  Description of Artificial Sequence:  Enzymatic Nucleic Acid
gauagacagccgaaaggcgagugaggucucuucaucc

SEQ ID NO: 18406 - RNA, 37 nt, Artificial Sequence
  Description of Artificial Sequence:  Enzymatic Nucleic Acid
gugauagagccgaaaggcgagugaggucuaccuucau

SEQ ID NO: 18407 - RNA, 37 nt, Artificial Sequence
  Description of Artificial Sequence:  Enzymatic Nucleic Acid
uggcuuuggccgaaaggcgagugaggucuagugauag

SEQ ID NO: 18408 - RNA, 37 nt, Artificial Sequence
  Description of Artificial Sequence:  Enzymatic Nucleic Acid
guuggugggccgaaaggcgagugaggucuuuugcagu

SEQ ID NO: 18409 - RNA, 37 nt, Artificial Sequence
  Description of Artificial Sequence:  Enzymatic Nucleic Acid
ccacagaggccgaaaggcgagugaggucuccuucugg

SEQ ID NO: 18410 - RNA, 37 nt, Artificial Sequence
  Description of Artificial Sequence:  Enzymatic Nucleic Acid
acuuuccagccgaaaggcgagugaggucuagagcccu

SEQ ID NO: 18411 - RNA, 37 nt, Artificial Sequence
  Description of Artificial Sequence:  Enzymatic Nucleic Acid
augcugaagccgaaaggcgagugaggucuuuuccaca

SEQ ID NO: 18412 - RNA, 37 nt, Artificial Sequence
  Description of Artificial Sequence:  Enzymatic Nucleic Acid
gagguauggccgaaaggcgagugaggucuugaacuuu

SEQ ID NO: 18413 - RNA, 37 nt, Artificial Sequence
  Description of Artificial Sequence:  Enzymatic Nucleic Acid
uccuugaagccgaaaggcgagugaggucuagugaggu

SEQ ID NO: 18414 - RNA, 37 nt, Artificial Sequence
  Description of Artificial Sequence:  Enzymatic Nucleic Acid
agauuagagccgaaaggcgagugaggucuuuguccga

SEQ ID NO: 18415 - RNA, 37 nt, Artificial Sequence
  Description of Artificial Sequence:  Enzymatic Nucleic Acid
gugaucaggccgaaaggcgagugaggucuuccagauu

SEQ ID NO: 18416 - RNA, 37 nt, Artificial Sequence
  Description of Artificial Sequence:  Enzymatic Nucleic Acid
cacagguggccgaaaggcgagugaggucuauguuaga

SEQ ID NO: 18417 - RNA, 37 nt, Artificial Sequence
  Description of Artificial Sequence:  Enzymatic Nucleic Acid
cagccacagccgaaaggcgagugaggucuaggugcau

SEQ ID NO: 18418 - RNA, 37 nt, Artificial Sequence
  Description of Artificial Sequence:  Enzymatic Nucleic Acid
cgcagccagccgaaaggcgagugaggucuacaggugc

SEQ ID NO: 18419 - RNA, 37 nt, Artificial Sequence
  Description of Artificial Sequence:  Enzymatic Nucleic Acid
agucgcaggccgaaaggcgagugaggucucacacagg

SEQ ID NO: 18420 - RNA, 37 nt, Artificial Sequence
  Description of Artificial Sequence:  Enzymatic Nucleic Acid
gagagucggccgaaaggcgagugaggucuagccacac

SEQ ID NO: 18421 - RNA, 37 nt, Artificial Sequence
  Description of Artificial Sequence:  Enzymatic Nucleic Acid
aauaggaggccgaaaggcgagugaggucucagaagag

SEQ ID NO: 18422 - RNA, 37 nt, Artificial Sequence
  Description of Artificial Sequence:  Enzymatic Nucleic Acid
gaagaagagccgaaaggcgagugaggucucuuuucau

SEQ ID NO: 18423 - RNA, 37 nt, Artificial Sequence
  Description of Artificial Sequence:  Enzymatic Nucleic Acid
caaaggaagccgaaaggcgagugaggucuuucaucug

SEQ ID NO: 18424 - RNA, 37 nt, Artificial Sequence
  Description of Artificial Sequence:  Enzymatic Nucleic Acid
ucacacuggccgaaaggcgagugaggucuucauccaa

SEQ ID NO: 18425 - RNA, 37 nt, Artificial Sequence
  Description of Artificial Sequence:  Enzymatic Nucleic Acid
cgcucacagccgaaaggcgagugaggucuugcucauc

SEQ ID NO: 18426 - RNA, 37 nt, Artificial Sequence
  Description of Artificial Sequence:  Enzymatic Nucleic Acid
gccgcucagccgaaaggcgagugaggucuacugcuca

SEQ ID NO: 18427 - RNA, 37 nt, Artificial Sequence
  Description of Artificial Sequence:  Enzymatic Nucleic Acid
gggagccggccgaaaggcgagugaggucuucacacug

SEQ ID NO: 18428 - RNA, 37 nt, Artificial Sequence
  Description of Artificial Sequence:  Enzymatic Nucleic Acid
uaagggaggccgaaaggcgagugaggucucgcucaca

SEQ ID NO: 18429 - RNA, 37 nt, Artificial Sequence
  Description of Artificial Sequence:  Enzymatic Nucleic Acid
cuugcugggccgaaaggcgagugaggucuaucauaag

SEQ ID NO: 18430 - RNA, 37 nt, Artificial Sequence
  Description of Artificial Sequence:  Enzymatic Nucleic Acid
cccacuuggccgaaaggcgagugaggucuuggcauca

SEQ ID NO: 18431 - RNA, 37 nt, Artificial Sequence
  Description of Artificial Sequence:  Enzymatic Nucleic Acid
aacucccagccgaaaggcgagugaggucuuugcuggc

SEQ ID NO: 18432 - RNA, 37 nt, Artificial Sequence
  Description of Artificial Sequence:  Enzymatic Nucleic Acid
cgggcaaagccgaaaggcgagugaggucuucccacuu

SEQ ID NO: 18433 - RNA, 37 nt, Artificial Sequence
  Description of Artificial Sequence:  Enzymatic Nucleic Acid
cucccggggccgaaaggcgagugaggucuaaacuccc

SEQ ID NO: 18434 - RNA, 37 nt, Artificial Sequence
  Description of Artificial Sequence:  Enzymatic Nucleic Acid
gugauuuggccgaaaggcgagugaggucuccaguuua

SEQ ID NO: 18435 - RNA, 37 nt, Artificial Sequence
  Description of Artificial Sequence:  Enzymatic Nucleic Acid
uccaaaaggccgaaaggcgagugaggucucccucuuc

SEQ ID NO: 18436 - RNA, 37 nt, Artificial Sequence
  Description of Artificial Sequence:  Enzymatic Nucleic Acid
uugaaccagccgaaaggcgagugaggucuuuuuccaa

SEQ ID NO: 18437 - RNA, 37 nt, Artificial Sequence
  Description of Artificial Sequence:  Enzymatic Nucleic Acid
ugcuugaagccgaaaggcgagugaggucucacuuuuc

SEQ ID NO: 18438 - RNA, 37 nt, Artificial Sequence
  Description of Artificial Sequence:  Enzymatic Nucleic Acid
ugcugauggccgaaaggcgagugaggucuuugaacca

SEQ ID NO: 18439 - RNA, 37 nt, Artificial Sequence
  Description of Artificial Sequence:  Enzymatic Nucleic Acid
gccaaauggccgaaaggcgagugaggucuugaugcuu

SEQ ID NO: 18440 - RNA, 37 nt, Artificial Sequence
  Description of Artificial Sequence:  Enzymatic Nucleic Acid
ucuuaauggccgaaaggcgagugaggucucaaaugcu

SEQ ID NO: 18441 - RNA, 37 nt, Artificial Sequence
  Description of Artificial Sequence:  Enzymatic Nucleic Acid
guccggcagccgaaaggcgagugaggucuguagguga

SEQ ID NO: 18442 - RNA, 37 nt, Artificial Sequence
  Description of Artificial Sequence:  Enzymatic Nucleic Acid
caguccgggccgaaaggcgagugaggucuacguaggu

SEQ ID NO: 18443 - RNA, 37 nt, Artificial Sequence
  Description of Artificial Sequence:  Enzymatic Nucleic Acid
cacagccagccgaaaggcgagugaggucuaguccggc

SEQ ID NO: 18444 - RNA, 37 nt, Artificial Sequence
  Description of Artificial Sequence:  Enzymatic Nucleic Acid
uuucacaggccgaaaggcgagugaggucucacagucc

SEQ ID NO: 18445 - RNA, 37 nt, Artificial Sequence
  Description of Artificial Sequence:  Enzymatic Nucleic Acid
cauuuucagccgaaaggcgagugaggucuagccacag

SEQ ID NO: 18446 - RNA, 37 nt, Artificial Sequence
  Description of Artificial Sequence:  Enzymatic Nucleic Acid
ucuuucaggccgaaaggcgagugaggucuauuuucac

SEQ ID NO: 18447 - RNA, 37 nt, Artificial Sequence
  Description of Artificial Sequence:  Enzymatic Nucleic Acid
ggccgugggccgaaaggcgagugaggucuccccucuu

SEQ ID NO: 18448 - RNA, 37 nt, Artificial Sequence
  Description of Artificial Sequence:  Enzymatic Nucleic Acid
cucgcugggccgaaaggcgagugaggucucguggccc

SEQ ID NO: 18449 - RNA, 37 nt, Artificial Sequence
  Description of Artificial Sequence:  Enzymatic Nucleic Acid
uguacucggccgaaaggcgagugaggucuuggccgug

SEQ ID NO: 18450 - RNA, 37 nt, Artificial Sequence
  Description of Artificial Sequence:  Enzymatic Nucleic Acid
gcuuuguagccgaaaggcgagugaggucuucgcuggc

SEQ ID NO: 18451 - RNA, 37 nt, Artificial Sequence
  Description of Artificial Sequence:  Enzymatic Nucleic Acid
caucagaggccgaaaggcgagugaggucuuuuguacu

SEQ ID NO: 18452 - RNA, 37 nt, Artificial Sequence
  Description of Artificial Sequence:  Enzymatic Nucleic Acid
auuuuuaggccgaaaggcgagugaggucuucagucau

SEQ ID NO: 18453 - RNA, 37 nt, Artificial Sequence
  Description of Artificial Sequence:  Enzymatic Nucleic Acid
gauggugggccgaaaggcgagugaggucucaaugugg

SEQ ID NO: 18454 - RNA, 37 nt, Artificial Sequence
  Description of Artificial Sequence:  Enzymatic Nucleic Acid
guuaaccagccgaaaggcgagugaggucuguucagau

SEQ ID NO: 18455 - RNA, 37 nt, Artificial Sequence
  Description of Artificial Sequence:  Enzymatic Nucleic Acid
cagguuaagccgaaaggcgagugaggucucacguuca

SEQ ID NO: 18456 - RNA, 37 nt, Artificial Sequence
  Description of Artificial Sequence:  Enzymatic Nucleic Acid
gcucccaggccgaaaggcgagugaggucuagguuaac

SEQ ID NO: 18457 - RNA, 37 nt, Artificial Sequence
  Description of Artificial Sequence:  Enzymatic Nucleic Acid
ggugcagggccgaaaggcgagugaggucuucccagca

SEQ ID NO: 18458 - RNA, 37 nt, Artificial Sequence
  Description of Artificial Sequence:  Enzymatic Nucleic Acid
gcuugguggccgaaaggcgagugaggucuaggcuccc

SEQ ID NO: 18459 - RNA, 37 nt, Artificial Sequence
  Description of Artificial Sequence:  Enzymatic Nucleic Acid
ccuccuuggccgaaaggcgagugaggucuuuggugca

SEQ ID NO: 18460 - RNA, 37 nt, Artificial Sequence
  Description of Artificial Sequence:  Enzymatic Nucleic Acid
aucagagggccgaaaggcgagugaggucuccuccuug

SEQ ID NO: 18461 - RNA, 37 nt, Artificial Sequence
  Description of Artificial Sequence:  Enzymatic Nucleic Acid
aacaaucagccgaaaggcgagugaggucucaucagag

SEQ ID NO: 18462 - RNA, 37 nt, Artificial Sequence
  Description of Artificial Sequence:  Enzymatic Nucleic Acid
guauucaagccgaaaggcgagugaggucuaaucacca

SEQ ID NO: 18463 - RNA, 37 nt, Artificial Sequence
  Description of Artificial Sequence:  Enzymatic Nucleic Acid
cauauuuggccgaaaggcgagugaggucuaguauuca

SEQ ID NO: 18464 - RNA, 37 nt, Artificial Sequence
  Description of Artificial Sequence:  Enzymatic Nucleic Acid
cacguuuggccgaaaggcgagugaggucuucuugagg

SEQ ID NO: 18465 - RNA, 37 nt, Artificial Sequence
  Description of Artificial Sequence:  Enzymatic Nucleic Acid
auaagucagccgaaaggcgagugaggucuguuugcuc

SEQ ID NO: 18466 - RNA, 37 nt, Artificial Sequence
  Description of Artificial Sequence:  Enzymatic Nucleic Acid
uagugcuggccgaaaggcgagugaggucuauccuugu

SEQ ID NO: 18467 - RNA, 37 nt, Artificial Sequence
  Description of Artificial Sequence:  Enzymatic Nucleic Acid
guguaguggccgaaaggcgagugaggucuugcauccu

SEQ ID NO: 18468 - RNA, 37 nt, Artificial Sequence
  Description of Artificial Sequence:  Enzymatic Nucleic Acid
uucuuagggccgaaaggcgagugaggucuuccaugug

SEQ ID NO: 18469 - RNA, 37 nt, Artificial Sequence
  Description of Artificial Sequence:  Enzymatic Nucleic Acid
aggccugggccgaaaggcgagugaggucuuccauuuu

SEQ ID NO: 18470 - RNA, 37 nt, Artificial Sequence
  Description of Artificial Sequence:  Enzymatic Nucleic Acid
guuccagggccgaaaggcgagugaggucucuggcucc

SEQ ID NO: 18471 - RNA, 37 nt, Artificial Sequence
  Description of Artificial Sequence:  Enzymatic Nucleic Acid
guuucuuggccgaaaggcgagugaggucucuuguucc

SEQ ID NO: 18472 - RNA, 37 nt, Artificial Sequence
  Description of Artificial Sequence:  Enzymatic Nucleic Acid
uggugacggccgaaaggcgagugaggucuuaucuagu

SEQ ID NO: 18473 - RNA, 37 nt, Artificial Sequence
  Description of Artificial Sequence:  Enzymatic Nucleic Acid
gcuggugagccgaaaggcgagugaggucugcuaucua

SEQ ID NO: 18474 - RNA, 37 nt, Artificial Sequence
  Description of Artificial Sequence:  Enzymatic Nucleic Acid
uuucgcuggccgaaaggcgagugaggucuuggugacg

SEQ ID NO: 18475 - RNA, 37 nt, Artificial Sequence
  Description of Artificial Sequence:  Enzymatic Nucleic Acid
agcuuucggccgaaaggcgagugaggucuugcuggug

SEQ ID NO: 18476 - RNA, 37 nt, Artificial Sequence
  Description of Artificial Sequence:  Enzymatic Nucleic Acid
ucgcaaaggccgaaaggcgagugaggucuuuucgcug

SEQ ID NO: 18477 - RNA, 37 nt, Artificial Sequence
  Description of Artificial Sequence:  Enzymatic Nucleic Acid
ggagcucggccgaaaggcgagugaggucuaaagcuuu

SEQ ID NO: 18478 - RNA, 37 nt, Artificial Sequence
  Description of Artificial Sequence:  Enzymatic Nucleic Acid
agccggaggccgaaaggcgagugaggucuucgcaaag

SEQ ID NO: 18479 - RNA, 37 nt, Artificial Sequence
  Description of Artificial Sequence:  Enzymatic Nucleic Acid
ccugaaaggccgaaaggcgagugaggucucggagcuc

SEQ ID NO: 18480 - RNA, 37 nt, Artificial Sequence
  Description of Artificial Sequence:  Enzymatic Nucleic Acid
cacucagagccgaaaggcgagugaggucuuuuuaucu

SEQ ID NO: 18481 - RNA, 37 nt, Artificial Sequence
  Description of Artificial Sequence:  Enzymatic Nucleic Acid
caacaucagccgaaaggcgagugaggucuucagacuu

SEQ ID NO: 18482 - RNA, 37 nt, Artificial Sequence
  Description of Artificial Sequence:  Enzymatic Nucleic Acid
uuccucaagccgaaaggcgagugaggucuaucacuca

SEQ ID NO: 18483 - RNA, 37 nt, Artificial Sequence
  Description of Artificial Sequence:  Enzymatic Nucleic Acid
uguagaaagccgaaaggcgagugaggucucgucagaa

SEQ ID NO: 18484 - RNA, 37 nt, Artificial Sequence
  Description of Artificial Sequence:  Enzymatic Nucleic Acid
gugauggggccgaaaggcgagugaggucuuccuugua

SEQ ID NO: 18485 - RNA, 37 nt, Artificial Sequence
  Description of Artificial Sequence:  Enzymatic Nucleic Acid
cuugaaaagccgaaaggcgagugaggucuuguaagaa

SEQ ID NO: 18486 - RNA, 37 nt, Artificial Sequence
  Description of Artificial Sequence:  Enzymatic Nucleic Acid
ucuggccagccgaaaggcgagugaggucuuugaaaac

SEQ ID NO: 18487 - RNA, 37 nt, Artificial Sequence
  Description of Artificial Sequence:  Enzymatic Nucleic Acid
gccucugggccgaaaggcgagugaggucucacuugaa

SEQ ID NO: 18488 - RNA, 37 nt, Artificial Sequence
  Description of Artificial Sequence:  Enzymatic Nucleic Acid
acuccauggccgaaaggcgagugaggucucucuggcc

SEQ ID NO: 18489 - RNA, 37 nt, Artificial Sequence
  Description of Artificial Sequence:  Enzymatic Nucleic Acid
gacaggaagccgaaaggcgagugaggucuuccaugcc

SEQ ID NO: 18490 - RNA, 37 nt, Artificial Sequence
  Description of Artificial Sequence:  Enzymatic Nucleic Acid
cuggaagagccgaaaggcgagugaggucuaggaacuc

SEQ ID NO: 18491 - RNA, 37 nt, Artificial Sequence
  Description of Artificial Sequence:  Enzymatic Nucleic Acid
ugaaugcagccgaaaggcgagugaggucuuuucugga

SEQ ID NO: 18492 - RNA, 37 nt, Artificial Sequence
  Description of Artificial Sequence:  Enzymatic Nucleic Acid
gaugaauggccgaaaggcgagugaggucuacuuucug

SEQ ID NO: 18493 - RNA, 37 nt, Artificial Sequence
  Description of Artificial Sequence:  Enzymatic Nucleic Acid
ucucgcuggccgaaaggcgagugaggucucagguccc

SEQ ID NO: 18494 - RNA, 37 nt, Artificial Sequence
  Description of Artificial Sequence:  Enzymatic Nucleic Acid
guuucucggccgaaaggcgagugaggucuugccaggu

SEQ ID NO: 18495 - RNA, 37 nt, Artificial Sequence
  Description of Artificial Sequence:  Enzymatic Nucleic Acid
cuucaccagccgaaaggcgagugaggucuguuguucu

SEQ ID NO: 18496 - RNA, 37 nt, Artificial Sequence
  Description of Artificial Sequence:  Enzymatic Nucleic Acid
aaucuucagccgaaaggcgagugaggucucacguugu

SEQ ID NO: 18497 - RNA, 37 nt, Artificial Sequence
  Description of Artificial Sequence:  Enzymatic Nucleic Acid
caaaaucagccgaaaggcgagugaggucuaaaucuuc

SEQ ID NO: 18498 - RNA, 37 nt, Artificial Sequence
  Description of Artificial Sequence:  Enzymatic Nucleic Acid
gggcaagggccgaaaggcgagugaggucucaaaauca

SEQ ID NO: 18499 - RNA, 37 nt, Artificial Sequence
  Description of Artificial Sequence:  Enzymatic Nucleic Acid
aucccggggccgaaaggcgagugaggucuaaggccaa

SEQ ID NO: 18500 - RNA, 37 nt, Artificial Sequence
  Description of Artificial Sequence:  Enzymatic Nucleic Acid
uuuucucagccgaaaggcgagugaggucuauaaucgg

SEQ ID NO: 18501 - RNA, 37 nt, Artificial Sequence
  Description of Artificial Sequence:  Enzymatic Nucleic Acid
uucgggaggccgaaaggcgagugaggucucauccauu

SEQ ID NO: 18502 - RNA, 37 nt, Artificial Sequence
  Description of Artificial Sequence:  Enzymatic Nucleic Acid
ucuugguggccgaaaggcgagugaggucuuguagauu

SEQ ID NO: 18503 - RNA, 37 nt, Artificial Sequence
  Description of Artificial Sequence:  Enzymatic Nucleic Acid
acacgucggccgaaaggcgagugaggucuucuuggug

SEQ ID NO: 18504 - RNA, 37 nt, Artificial Sequence
  Description of Artificial Sequence:  Enzymatic Nucleic Acid
agaccacagccgaaaggcgagugaggucugucgcucu

SEQ ID NO: 18505 - RNA, 37 nt, Artificial Sequence
  Description of Artificial Sequence:  Enzymatic Nucleic Acid
uaagaccagccgaaaggcgagugaggucuacgucgcu

SEQ ID NO: 18506 - RNA, 37 nt, Artificial Sequence
  Description of Artificial Sequence:  Enzymatic Nucleic Acid
ccguaagagccgaaaggcgagugaggucucacacguc

SEQ ID NO: 18507 - RNA, 37 nt, Artificial Sequence
  Description of Artificial Sequence:  Enzymatic Nucleic Acid
cagcaauagccgaaaggcgagugaggucuuccguaag

SEQ ID NO: 18508 - RNA, 37 nt, Artificial Sequence
  Description of Artificial Sequence:  Enzymatic Nucleic Acid
ucccacaggccgaaaggcgagugaggucuaauacucc

SEQ ID NO: 18509 - RNA, 37 nt, Artificial Sequence
  Description of Artificial Sequence:  Enzymatic Nucleic Acid
auuucccagccgaaaggcgagugaggucuagcaauac

SEQ ID NO: 18510 - RNA, 37 nt, Artificial Sequence
  Description of Artificial Sequence:  Enzymatic Nucleic Acid
gagacccagccgaaaggcgagugaggucucuaaggag

SEQ ID NO: 18511 - RNA, 37 nt, Artificial Sequence
  Description of Artificial Sequence:  Enzymatic Nucleic Acid
uauggagagccgaaaggcgagugaggucuccaccuaa

SEQ ID NO: 18512 - RNA, 37 nt, Artificial Sequence
  Description of Artificial Sequence:  Enzymatic Nucleic Acid
cauuuguagccgaaaggcgagugaggucuuccugggu

SEQ ID NO: 18513 - RNA, 37 nt, Artificial Sequence
  Description of Artificial Sequence:  Enzymatic Nucleic Acid
ggcgacuggccgaaaggcgagugaggucuaaaagucc

SEQ ID NO: 18514 - RNA, 37 nt, Artificial Sequence
  Description of Artificial Sequence:  Enzymatic Nucleic Acid
ucaggcgagccgaaaggcgagugaggucuugcaaaag

SEQ ID NO: 18515 - RNA, 37 nt, Artificial Sequence
  Description of Artificial Sequence:  Enzymatic Nucleic Acid
cccucagggccgaaaggcgagugaggucugacugcaa

SEQ ID NO: 18516 - RNA, 37 nt, Artificial Sequence
  Description of Artificial Sequence:  Enzymatic Nucleic Acid
uccucauggccgaaaggcgagugaggucucuucccuc

SEQ ID NO: 18517 - RNA, 37 nt, Artificial Sequence
  Description of Artificial Sequence:  Enzymatic Nucleic Acid
cucaggaggccgaaaggcgagugaggucuucucaucc

SEQ ID NO: 18518 - RNA, 37 nt, Artificial Sequence
  Description of Artificial Sequence:  Enzymatic Nucleic Acid
guagaguagccgaaaggcgagugaggucuucaggagc

SEQ ID NO: 18519 - RNA, 37 nt, Artificial Sequence
  Description of Artificial Sequence:  Enzymatic Nucleic Acid
caguccaggccgaaaggcgagugaggucuaugaucug

SEQ ID NO: 18520 - RNA, 37 nt, Artificial Sequence
  Description of Artificial Sequence:  Enzymatic Nucleic Acid
ugugccaggccgaaaggcgagugaggucuaguccagc

SEQ ID NO: 18521 - RNA, 37 nt, Artificial Sequence
  Description of Artificial Sequence:  Enzymatic Nucleic Acid
ucucuguggccgaaaggcgagugaggucucagcaguc

SEQ ID NO: 18522 - RNA, 37 nt, Artificial Sequence
  Description of Artificial Sequence:  Enzymatic Nucleic Acid
aaucuugggccgaaaggcgagugaggucucuuucuuu

SEQ ID NO: 18523 - RNA, 37 nt, Artificial Sequence
  Description of Artificial Sequence:  Enzymatic Nucleic Acid
aaguucuggccgaaaggcgagugaggucuaaaucuug

SEQ ID NO: 18524 - RNA, 37 nt, Artificial Sequence
  Description of Artificial Sequence:  Enzymatic Nucleic Acid
uuuuuccagccgaaaggcgagugaggucuaaguucug

SEQ ID NO: 18525 - RNA, 37 nt, Artificial Sequence
  Description of Artificial Sequence:  Enzymatic Nucleic Acid
gcaaaucagccgaaaggcgagugaggucucuaguuuu

SEQ ID NO: 18526 - RNA, 37 nt, Artificial Sequence
  Description of Artificial Sequence:  Enzymatic Nucleic Acid
gcuugaaggccgaaaggcgagugaggucuaaaucacc

SEQ ID NO: 18527 - RNA, 37 nt, Artificial Sequence
  Description of Artificial Sequence:  Enzymatic Nucleic Acid
uacauuuggccgaaaggcgagugaggucuuugaagca

SEQ ID NO: 18528 - RNA, 37 nt, Artificial Sequence
  Description of Artificial Sequence:  Enzymatic Nucleic Acid
cuguuguagccgaaaggcgagugaggucuauuugcuu

SEQ ID NO: 18529 - RNA, 37 nt, Artificial Sequence
  Description of Artificial Sequence:  Enzymatic Nucleic Acid
agucuuuagccgaaaggcgagugaggucucauccugu

SEQ ID NO: 18530 - RNA, 37 nt, Artificial Sequence
  Description of Artificial Sequence:  Enzymatic Nucleic Acid
caguaugggccgaaaggcgagugaggucuauugauug

SEQ ID NO: 18531 - RNA, 37 nt, Artificial Sequence
  Description of Artificial Sequence:  Enzymatic Nucleic Acid
uaaacccagccgaaaggcgagugaggucuuauuuccu

SEQ ID NO: 18532 - RNA, 37 nt, Artificial Sequence
  Description of Artificial Sequence:  Enzymatic Nucleic Acid
uauguaaagccgaaaggcgagugaggucuccacuauu

SEQ ID NO: 18533 - RNA, 37 nt, Artificial Sequence
  Description of Artificial Sequence:  Enzymatic Nucleic Acid
agagaagggccgaaaggcgagugaggucuaggaguug

SEQ ID NO: 18534 - RNA, 37 nt, Artificial Sequence
  Description of Artificial Sequence:  Enzymatic Nucleic Acid
cugaaauagccgaaaggcgagugaggucuuuuccuug

SEQ ID NO: 18535 - RNA, 37 nt, Artificial Sequence
  Description of Artificial Sequence:  Enzymatic Nucleic Acid
cuucggaggccgaaaggcgagugaggucuugaaauac

SEQ ID NO: 18536 - RNA, 37 nt, Artificial Sequence
  Description of Artificial Sequence:  Enzymatic Nucleic Acid
gaauuaaagccgaaaggcgagugaggucuuucggagc

SEQ ID NO: 18537 - RNA, 37 nt, Artificial Sequence
  Description of Artificial Sequence:  Enzymatic Nucleic Acid
caucagaggccgaaaggcgagugaggucuuuccugaa

SEQ ID NO: 18538 - RNA, 37 nt, Artificial Sequence
  Description of Artificial Sequence:  Enzymatic Nucleic Acid
auaucugagccgaaaggcgagugaggucuaucaucag

SEQ ID NO: 18539 - RNA, 37 nt, Artificial Sequence
  Description of Artificial Sequence:  Enzymatic Nucleic Acid
agcauuuagccgaaaggcgagugaggucuauaucuga

SEQ ID NO: 18540 - RNA, 37 nt, Artificial Sequence
  Description of Artificial Sequence:  Enzymatic Nucleic Acid
cuugaaaggccgaaaggcgagugaggucuauuuacau

SEQ ID NO: 18541 - RNA, 37 nt, Artificial Sequence
  Description of Artificial Sequence:  Enzymatic Nucleic Acid
cucaugaagccgaaaggcgagugaggucuuugaaagc

SEQ ID NO: 18542 - RNA, 37 nt, Artificial Sequence
  Description of Artificial Sequence:  Enzymatic Nucleic Acid
uuuccagggccgaaaggcgagugaggucuucaugaac

SEQ ID NO: 18543 - RNA, 37 nt, Artificial Sequence
  Description of Artificial Sequence:  Enzymatic Nucleic Acid
ggaggugggccgaaaggcgagugaggucuauucggua

SEQ ID NO: 18544 - RNA, 37 nt, Artificial Sequence
  Description of Artificial Sequence:  Enzymatic Nucleic Acid
ucaucaaagccgaaaggcgagugaggucuauggaggu

SEQ ID NO: 18545 - RNA, 37 nt, Artificial Sequence
  Description of Artificial Sequence:  Enzymatic Nucleic Acid
ugcugucggccgaaaggcgagugaggucuccugguag

SEQ ID NO: 18546 - RNA, 37 nt, Artificial Sequence
  Description of Artificial Sequence:  Enzymatic Nucleic Acid
gagugcuggccgaaaggcgagugaggucuugucgccc

SEQ ID NO: 18547 - RNA, 37 nt, Artificial Sequence
  Description of Artificial Sequence:  Enzymatic Nucleic Acid
acagaguggccgaaaggcgagugaggucuugcugucg

SEQ ID NO: 18548 - RNA, 37 nt, Artificial Sequence
  Description of Artificial Sequence:  Enzymatic Nucleic Acid
gaggccaagccgaaaggcgagugaggucuagagugcu

SEQ ID NO: 18549 - RNA, 37 nt, Artificial Sequence
  Description of Artificial Sequence:  Enzymatic Nucleic Acid
gggagagggccgaaaggcgagugaggucucaacagag

SEQ ID NO: 18550 - RNA, 37 nt, Artificial Sequence
  Description of Artificial Sequence:  Enzymatic Nucleic Acid
cgcuucaggccgaaaggcgagugaggucuaugggaga

SEQ ID NO: 18551 - RNA, 37 nt, Artificial Sequence
  Description of Artificial Sequence:  Enzymatic Nucleic Acid
gugaagcggccgaaaggcgagugaggucuuucagcau

SEQ ID NO: 18552 - RNA, 37 nt, Artificial Sequence
  Description of Artificial Sequence:  Enzymatic Nucleic Acid
aggugaaggccgaaaggcgagugaggucugcuucagc

SEQ ID NO: 18553 - RNA, 37 nt, Artificial Sequence
  Description of Artificial Sequence:  Enzymatic Nucleic Acid
uggguuuggccgaaaggcgagugaggucuugucaguc

SEQ ID NO: 18554 - RNA, 37 nt, Artificial Sequence
  Description of Artificial Sequence:  Enzymatic Nucleic Acid
gagcgagggccgaaaggcgagugaggucucuuggguu

SEQ ID NO: 18555 - RNA, 37 nt, Artificial Sequence
  Description of Artificial Sequence:  Enzymatic Nucleic Acid
aucuugaggccgaaaggcgagugaggucugaggccuu

SEQ ID NO: 18556 - RNA, 37 nt, Artificial Sequence
  Description of Artificial Sequence:  Enzymatic Nucleic Acid
acugguuagccgaaaggcgagugaggucuucucaagu

SEQ ID NO: 18557 - RNA, 37 nt, Artificial Sequence
  Description of Artificial Sequence:  Enzymatic Nucleic Acid
uacuuuuagccgaaaggcgagugaggucuugguuacu

SEQ ID NO: 18558 - RNA, 37 nt, Artificial Sequence
  Description of Artificial Sequence:  Enzymatic Nucleic Acid
acuccuuagccgaaaggcgagugaggucuuuuuacug

SEQ ID NO: 18559 - RNA, 37 nt, Artificial Sequence
  Description of Artificial Sequence:  Enzymatic Nucleic Acid
agccccgagccgaaaggcgagugaggucuuccuuacu

SEQ ID NO: 18560 - RNA, 37 nt, Artificial Sequence
  Description of Artificial Sequence:  Enzymatic Nucleic Acid
ucagacaggccgaaaggcgagugaggucucccgacuc

SEQ ID NO: 18561 - RNA, 37 nt, Artificial Sequence
  Description of Artificial Sequence:  Enzymatic Nucleic Acid
acaucagagccgaaaggcgagugaggucuagccccga

SEQ ID NO: 18562 - RNA, 37 nt, Artificial Sequence
  Description of Artificial Sequence:  Enzymatic Nucleic Acid
ccugcugagccgaaaggcgagugaggucuaucagaca

SEQ ID NO: 18563 - RNA, 37 nt, Artificial Sequence
  Description of Artificial Sequence:  Enzymatic Nucleic Acid
ugggccuggccgaaaggcgagugaggucuugacauca

SEQ ID NO: 18564 - RNA, 37 nt, Artificial Sequence
  Description of Artificial Sequence:  Enzymatic Nucleic Acid
aaacuggggccgaaaggcgagugaggucucugcugac

SEQ ID NO: 18565 - RNA, 37 nt, Artificial Sequence
  Description of Artificial Sequence:  Enzymatic Nucleic Acid
ggcagaaagccgaaaggcgagugaggucuugggccug

SEQ ID NO: 18566 - RNA, 37 nt, Artificial Sequence
  Description of Artificial Sequence:  Enzymatic Nucleic Acid
uggaaugggccgaaaggcgagugaggucuagaaacug

SEQ ID NO: 18567 - RNA, 37 nt, Artificial Sequence
  Description of Artificial Sequence:  Enzymatic Nucleic Acid
gcccacaggccgaaaggcgagugaggucuuggaaugg

SEQ ID NO: 18568 - RNA, 37 nt, Artificial Sequence
  Description of Artificial Sequence:  Enzymatic Nucleic Acid
cgugcccagccgaaaggcgagugaggucuagcuggaa

SEQ ID NO: 18569 - RNA, 37 nt, Artificial Sequence
  Description of Artificial Sequence:  Enzymatic Nucleic Acid
cugacguggccgaaaggcgagugaggucuccacagcu

SEQ ID NO: 18570 - RNA, 37 nt, Artificial Sequence
  Description of Artificial Sequence:  Enzymatic Nucleic Acid
uucgcugagccgaaaggcgagugaggucugugcccac

SEQ ID NO: 18571 - RNA, 37 nt, Artificial Sequence
  Description of Artificial Sequence:  Enzymatic Nucleic Acid
ugccuucggccgaaaggcgagugaggucuugacgugc

SEQ ID NO: 18572 - RNA, 37 nt, Artificial Sequence
  Description of Artificial Sequence:  Enzymatic Nucleic Acid
ugcgcuuggccgaaaggcgagugaggucucuucgcug

SEQ ID NO: 18573 - RNA, 37 nt, Artificial Sequence
  Description of Artificial Sequence:  Enzymatic Nucleic Acid
aaccugcggccgaaaggcgagugaggucuuugccuuc

SEQ ID NO: 18574 - RNA, 37 nt, Artificial Sequence
  Description of Artificial Sequence:  Enzymatic Nucleic Acid
ugaaccuggccgaaaggcgagugaggucugcuugccu

SEQ ID NO: 18575 - RNA, 37 nt, Artificial Sequence
  Description of Artificial Sequence:  Enzymatic Nucleic Acid
uaggugaagccgaaaggcgagugaggucucugcgcuu

SEQ ID NO: 18576 - RNA, 37 nt, Artificial Sequence
  Description of Artificial Sequence:  Enzymatic Nucleic Acid
cagcucaggccgaaaggcgagugaggucuguggucgu

SEQ ID NO: 18577 - RNA, 37 nt, Artificial Sequence
  Description of Artificial Sequence:  Enzymatic Nucleic Acid
cuuuccaggccgaaaggcgagugaggucuucagcgug

SEQ ID NO: 18578 - RNA, 37 nt, Artificial Sequence
  Description of Artificial Sequence:  Enzymatic Nucleic Acid
gcagcacggccgaaaggcgagugaggucugauuuucc

SEQ ID NO: 18579 - RNA, 37 nt, Artificial Sequence
  Description of Artificial Sequence:  Enzymatic Nucleic Acid
gagcagcagccgaaaggcgagugaggucugcgauuuu

SEQ ID NO: 18580 - RNA, 37 nt, Artificial Sequence
  Description of Artificial Sequence:  Enzymatic Nucleic Acid
gggagcaggccgaaaggcgagugaggucuacgcgauu

SEQ ID NO: 18581 - RNA, 37 nt, Artificial Sequence
  Description of Artificial Sequence:  Enzymatic Nucleic Acid
gcggggaggccgaaaggcgagugaggucuagcacgcg

SEQ ID NO: 18582 - RNA, 37 nt, Artificial Sequence
  Description of Artificial Sequence:  Enzymatic Nucleic Acid
ucuggggggccgaaaggcgagugaggucuggggagca

SEQ ID NO: 18583 - RNA, 37 nt, Artificial Sequence
  Description of Artificial Sequence:  Enzymatic Nucleic Acid
caggaccagccgaaaggcgagugaggucucgaguugu

SEQ ID NO: 18584 - RNA, 37 nt, Artificial Sequence
  Description of Artificial Sequence:  Enzymatic Nucleic Acid
guacaggagccgaaaggcgagugaggucucaccgagu

SEQ ID NO: 18585 - RNA, 37 nt, Artificial Sequence
  Description of Artificial Sequence:  Enzymatic Nucleic Acid
guggaguagccgaaaggcgagugaggucuaggaccac

SEQ ID NO: 18586 - RNA, 37 nt, Artificial Sequence
  Description of Artificial Sequence:  Enzymatic Nucleic Acid
gugucaaagccgaaaggcgagugaggucuucuagaug

SEQ ID NO: 18587 - RNA, 37 nt, Artificial Sequence
  Description of Artificial Sequence:  Enzymatic Nucleic Acid
aaauaagggccgaaaggcgagugaggucuuucguguc

SEQ ID NO: 18588 - RNA, 37 nt, Artificial Sequence
  Description of Artificial Sequence:  Enzymatic Nucleic Acid
cacauguggccgaaaggcgagugaggucuuucuagaa

SEQ ID NO: 18589 - RNA, 37 nt, Artificial Sequence
  Description of Artificial Sequence:  Enzymatic Nucleic Acid
uaaauacagccgaaaggcgagugaggucuaugugcuu

SEQ ID NO: 18590 - RNA, 37 nt, Artificial Sequence
  Description of Artificial Sequence:  Enzymatic Nucleic Acid
uauaaauagccgaaaggcgagugaggucuacaugugc

SEQ ID NO: 18591 - RNA, 37 nt, Artificial Sequence
  Description of Artificial Sequence:  Enzymatic Nucleic Acid
ggcaaaaggccgaaaggcgagugaggucuuaguuucc

SEQ ID NO: 18592 - RNA, 37 nt, Artificial Sequence
  Description of Artificial Sequence:  Enzymatic Nucleic Acid
aauacugggccgaaaggcgagugaggucuaaaagcua

SEQ ID NO: 18593 - RNA, 37 nt, Artificial Sequence
  Description of Artificial Sequence:  Enzymatic Nucleic Acid
gcauaauagccgaaaggcgagugaggucuuggcaaaa

SEQ ID NO: 18594 - RNA, 37 nt, Artificial Sequence
  Description of Artificial Sequence:  Enzymatic Nucleic Acid
uauauauggccgaaaggcgagugaggucuauaauacu

SEQ ID NO: 18595 - RNA, 37 nt, Artificial Sequence
  Description of Artificial Sequence:  Enzymatic Nucleic Acid
gguguaaagccgaaaggcgagugaggucuuuauauau

SEQ ID NO: 18596 - RNA, 37 nt, Artificial Sequence
  Description of Artificial Sequence:  Enzymatic Nucleic Acid
gcagcugggccgaaaggcgagugaggucuucccaugg

SEQ ID NO: 18597 - RNA, 37 nt, Artificial Sequence
  Description of Artificial Sequence:  Enzymatic Nucleic Acid
aaaagcaggccgaaaggcgagugaggucuuggcuccc

SEQ ID NO: 18598 - RNA, 37 nt, Artificial Sequence
  Description of Artificial Sequence:  Enzymatic Nucleic Acid
acaaaaaggccgaaaggcgagugaggucuagcuggcu

SEQ ID NO: 18599 - RNA, 37 nt, Artificial Sequence
  Description of Artificial Sequence:  Enzymatic Nucleic Acid
aaaaaucagccgaaaggcgagugaggucuaaaaagca

SEQ ID NO: 18600 - RNA, 37 nt, Artificial Sequence
  Description of Artificial Sequence:  Enzymatic Nucleic Acid
aaaaagcagccgaaaggcgagugaggucuuauuaaaa

SEQ ID NO: 18601 - RNA, 37 nt, Artificial Sequence
  Description of Artificial Sequence:  Enzymatic Nucleic Acid
aaaaaaaggccgaaaggcgagugaggucuacuauuaa

SEQ ID NO: 18602 - RNA, 37 nt, Artificial Sequence
  Description of Artificial Sequence:  Enzymatic Nucleic Acid
uggaguuagccgaaaggcgagugaggucuauucuugu

SEQ ID NO: 18603 - RNA, 37 nt, Artificial Sequence
  Description of Artificial Sequence:  Enzymatic Nucleic Acid
acuugucagccgaaaggcgagugaggucuuauuucuc

SEQ ID NO: 18604 - RNA, 37 nt, Artificial Sequence
  Description of Artificial Sequence:  Enzymatic Nucleic Acid
guucuucagccgaaaggcgagugaggucuuugucacu

SEQ ID NO: 18605 - RNA, 37 nt, Artificial Sequence
  Description of Artificial Sequence:  Enzymatic Nucleic Acid
ggauuuaggccgaaaggcgagugaggucuaguagugu

SEQ ID NO: 18606 - RNA, 37 nt, Artificial Sequence
  Description of Artificial Sequence:  Enzymatic Nucleic Acid
cugaguaagccgaaaggcgagugaggucuaugaggau

SEQ ID NO: 18607 - RNA, 37 nt, Artificial Sequence
  Description of Artificial Sequence:  Enzymatic Nucleic Acid
cucuaacagccgaaaggcgagugaggucuugaguaac

SEQ ID NO: 18608 - RNA, 37 nt, Artificial Sequence
  Description of Artificial Sequence:  Enzymatic Nucleic Acid
uucucuaagccgaaaggcgagugaggucuacugagua

SEQ ID NO: 18609 - RNA, 37 nt, Artificial Sequence
  Description of Artificial Sequence:  Enzymatic Nucleic Acid
gguuggaggccgaaaggcgagugaggucuagggaagu

SEQ ID NO: 18610 - RNA, 37 nt, Artificial Sequence
  Description of Artificial Sequence:  Enzymatic Nucleic Acid
ugaggugggccgaaaggcgagugaggucuggggguug

SEQ ID NO: 18611 - RNA, 37 nt, Artificial Sequence
  Description of Artificial Sequence:  Enzymatic Nucleic Acid
ccugcguggccgaaaggcgagugaggucuccugaggu

SEQ ID NO: 18612 - RNA, 37 nt, Artificial Sequence
  Description of Artificial Sequence:  Enzymatic Nucleic Acid
ugguccuggccgaaaggcgagugaggucugugcccug

SEQ ID NO: 18613 - RNA, 37 nt, Artificial Sequence
  Description of Artificial Sequence:  Enzymatic Nucleic Acid
caaucaaagccgaaaggcgagugaggucuugguccug

SEQ ID NO: 18614 - RNA, 37 nt, Artificial Sequence
  Description of Artificial Sequence:  Enzymatic Nucleic Acid
cagugcaggccgaaaggcgagugaggucuuccucaau

SEQ ID NO: 18615 - RNA, 37 nt, Artificial Sequence
  Description of Artificial Sequence:  Enzymatic Nucleic Acid
gaucaguggccgaaaggcgagugaggucuagcuccuc

SEQ ID NO: 18616 - RNA, 37 nt, Artificial Sequence
  Description of Artificial Sequence:  Enzymatic Nucleic Acid
acgugauggccgaaaggcgagugaggucuauugggug

SEQ ID NO: 18617 - RNA, 37 nt, Artificial Sequence
  Description of Artificial Sequence:  Enzymatic Nucleic Acid
gugggguagccgaaaggcgagugaggucugugaugca

SEQ ID NO: 18618 - RNA, 37 nt, Artificial Sequence
  Description of Artificial Sequence:  Enzymatic Nucleic Acid
agggcugggccgaaaggcgagugaggucuccaguggg

SEQ ID NO: 18619 - RNA, 37 nt, Artificial Sequence
  Description of Artificial Sequence:  Enzymatic Nucleic Acid
cugcaggggccgaaaggcgagugaggucuuggcccag

SEQ ID NO: 18620 - RNA, 37 nt, Artificial Sequence
  Description of Artificial Sequence:  Enzymatic Nucleic Acid
uugggcuggccgaaaggcgagugaggucuagggcugg

SEQ ID NO: 18621 - RNA, 37 nt, Artificial Sequence
  Description of Artificial Sequence:  Enzymatic Nucleic Acid
guuuuggggccgaaaggcgagugaggucuugcagggc

SEQ ID NO: 18622 - RNA, 37 nt, Artificial Sequence
  Description of Artificial Sequence:  Enzymatic Nucleic Acid
gcuuguuggccgaaaggcgagugaggucuccuggguu

SEQ ID NO: 18623 - RNA, 37 nt, Artificial Sequence
  Description of Artificial Sequence:  Enzymatic Nucleic Acid
cuaacggggccgaaaggcgagugaggucuuuguugcc

SEQ ID NO: 18624 - RNA, 37 nt, Artificial Sequence
  Description of Artificial Sequence:  Enzymatic Nucleic Acid
ggggcuaagccgaaaggcgagugaggucugggcuugu

SEQ ID NO: 18625 - RNA, 37 nt, Artificial Sequence
  Description of Artificial Sequence:  Enzymatic Nucleic Acid
cccugggggccgaaaggcgagugaggucuuaacgggc

SEQ ID NO: 18626 - RNA, 37 nt, Artificial Sequence
  Description of Artificial Sequence:  Enzymatic Nucleic Acid
caggccaggccgaaaggcgagugaggucucagugauc

SEQ ID NO: 18627 - RNA, 37 nt, Artificial Sequence
  Description of Artificial Sequence:  Enzymatic Nucleic Acid
ugcucagggccgaaaggcgagugaggucucagccagu

SEQ ID NO: 18628 - RNA, 37 nt, Artificial Sequence
  Description of Artificial Sequence:  Enzymatic Nucleic Acid
agauguuggccgaaaggcgagugaggucuucaggcca

SEQ ID NO: 18629 - RNA, 37 nt, Artificial Sequence
  Description of Artificial Sequence:  Enzymatic Nucleic Acid
cuagaggagccgaaaggcgagugaggucuucccgaga

SEQ ID NO: 18630 - RNA, 37 nt, Artificial Sequence
  Description of Artificial Sequence:  Enzymatic Nucleic Acid
uaggccuggccgaaaggcgagugaggucuuagaggac

SEQ ID NO: 18631 - RNA, 37 nt, Artificial Sequence
  Description of Artificial Sequence:  Enzymatic Nucleic Acid
gucuuagggccgaaaggcgagugaggucucugcuaga

SEQ ID NO: 18632 - RNA, 37 nt, Artificial Sequence
  Description of Artificial Sequence:  Enzymatic Nucleic Acid
ccuccucagccgaaaggcgagugaggucuaugucuua

SEQ ID NO: 18633 - RNA, 37 nt, Artificial Sequence
  Description of Artificial Sequence:  Enzymatic Nucleic Acid
gcuuuuuggccgaaaggcgagugaggucuuuuuuuuc

SEQ ID NO: 18634 - RNA, 37 nt, Artificial Sequence
  Description of Artificial Sequence:  Enzymatic Nucleic Acid
cucccuuggccgaaaggcgagugaggucuuuuuugcu

SEQ ID NO: 18635 - RNA, 37 nt, Artificial Sequence
  Description of Artificial Sequence:  Enzymatic Nucleic Acid
uucucauggccgaaaggcgagugaggucucuucuccc

SEQ ID NO: 18636 - RNA, 37 nt, Artificial Sequence
  Description of Artificial Sequence:  Enzymatic Nucleic Acid
acaugguggccgaaaggcgagugaggucugucucaaa

SEQ ID NO: 18637 - RNA, 37 nt, Artificial Sequence
  Description of Artificial Sequence:  Enzymatic Nucleic Acid
cgugcccagccgaaaggcgagugaggucuauggugcg

SEQ ID NO: 18638 - RNA, 37 nt, Artificial Sequence
  Description of Artificial Sequence:  Enzymatic Nucleic Acid
ccuccguggccgaaaggcgagugaggucuccacaugg

SEQ ID NO: 18639 - RNA, 37 nt, Artificial Sequence
  Description of Artificial Sequence:  Enzymatic Nucleic Acid
uugcugaggccgaaaggcgagugaggucucccguccc

SEQ ID NO: 18640 - RNA, 37 nt, Artificial Sequence
  Description of Artificial Sequence:  Enzymatic Nucleic Acid
uggcauuggccgaaaggcgagugaggucuugagcccc

SEQ ID NO: 18641 - RNA, 37 nt, Artificial Sequence
  Description of Artificial Sequence:  Enzymatic Nucleic Acid
ugaaaugggccgaaaggcgagugaggucuauugcuga

SEQ ID NO: 18642 - RNA, 37 nt, Artificial Sequence
  Description of Artificial Sequence:  Enzymatic Nucleic Acid
ggaagccagccgaaaggcgagugaggucuugaaaugg

SEQ ID NO: 18643 - RNA, 37 nt, Artificial Sequence
  Description of Artificial Sequence:  Enzymatic Nucleic Acid
cugggaaggccgaaaggcgagugaggucucacugaaa

SEQ ID NO: 18644 - RNA, 37 nt, Artificial Sequence
  Description of Artificial Sequence:  Enzymatic Nucleic Acid
ggucagaggccgaaaggcgagugaggucuugggaagc

SEQ ID NO: 18645 - RNA, 37 nt, Artificial Sequence
  Description of Artificial Sequence:  Enzymatic Nucleic Acid
uggcuggggccgaaaggcgagugaggucuccucaaau

SEQ ID NO: 18646 - RNA, 37 nt, Artificial Sequence
  Description of Artificial Sequence:  Enzymatic Nucleic Acid
gcuccugggccgaaaggcgagugaggucuugggcccu

SEQ ID NO: 18647 - RNA, 37 nt, Artificial Sequence
  Description of Artificial Sequence:  Enzymatic Nucleic Acid
uccaucuggccgaaaggcgagugaggucuuccuggcu

SEQ ID NO: 18648 - RNA, 37 nt, Artificial Sequence
  Description of Artificial Sequence:  Enzymatic Nucleic Acid
ccucaucggccgaaaggcgagugaggucuuguccauc

SEQ ID NO: 18649 - RNA, 37 nt, Artificial Sequence
  Description of Artificial Sequence:  Enzymatic Nucleic Acid
uuuucuuggccgaaaggcgagugaggucucucccaga

SEQ ID NO: 18650 - RNA, 37 nt, Artificial Sequence
  Description of Artificial Sequence:  Enzymatic Nucleic Acid
aaaauuuggccgaaaggcgagugaggucuuuuaguuc

SEQ ID NO: 18651 - RNA, 37 nt, Artificial Sequence
  Description of Artificial Sequence:  Enzymatic Nucleic Acid
uagaaccagccgaaaggcgagugaggucuuuccauag

SEQ ID NO: 18652 - RNA, 37 nt, Artificial Sequence
  Description of Artificial Sequence:  Enzymatic Nucleic Acid
acauagaagccgaaaggcgagugaggucucacuucca

SEQ ID NO: 18653 - RNA, 37 nt, Artificial Sequence
  Description of Artificial Sequence:  Enzymatic Nucleic Acid
agaauggagccgaaaggcgagugaggucuauagaacc

SEQ ID NO: 18654 - RNA, 37 nt, Artificial Sequence
  Description of Artificial Sequence:  Enzymatic Nucleic Acid
acaugccagccgaaaggcgagugaggucugaaugaga

SEQ ID NO: 18655 - RNA, 37 nt, Artificial Sequence
  Description of Artificial Sequence:  Enzymatic Nucleic Acid
aaaacauggccgaaaggcgagugaggucucacgaaug

SEQ ID NO: 18656 - RNA, 37 nt, Artificial Sequence
  Description of Artificial Sequence:  Enzymatic Nucleic Acid
aaucaaaagccgaaaggcgagugaggucuaugccacg

SEQ ID NO: 18657 - RNA, 37 nt, Artificial Sequence
  Description of Artificial Sequence:  Enzymatic Nucleic Acid
cagugcuagccgaaaggcgagugaggucuaaaucaaa

SEQ ID NO: 18658 - RNA, 37 nt, Artificial Sequence
  Description of Artificial Sequence:  Enzymatic Nucleic Acid
ccucaguggccgaaaggcgagugaggucuuacaaauc

SEQ ID NO: 18659 - RNA, 37 nt, Artificial Sequence
  Description of Artificial Sequence:  Enzymatic Nucleic Acid
gagugccagccgaaaggcgagugaggucuccucagug

SEQ ID NO: 18660 - RNA, 37 nt, Artificial Sequence
  Description of Artificial Sequence:  Enzymatic Nucleic Acid
guugaguggccgaaaggcgagugaggucucacccuca

SEQ ID NO: 18661 - RNA, 37 nt, Artificial Sequence
  Description of Artificial Sequence:  Enzymatic Nucleic Acid
aguauggggccgaaaggcgagugaggucuucagaguu

SEQ ID NO: 18662 - RNA, 37 nt, Artificial Sequence
  Description of Artificial Sequence:  Enzymatic Nucleic Acid
uagaggaggccgaaaggcgagugaggucucaaaagua

SEQ ID NO: 18663 - RNA, 37 nt, Artificial Sequence
  Description of Artificial Sequence:  Enzymatic Nucleic Acid
gcaucuuagccgaaaggcgagugaggucuuagaggag

SEQ ID NO: 18664 - RNA, 37 nt, Artificial Sequence
  Description of Artificial Sequence:  Enzymatic Nucleic Acid
uuucaguggccgaaaggcgagugaggucuaucuuacu

SEQ ID NO: 18665 - RNA, 37 nt, Artificial Sequence
  Description of Artificial Sequence:  Enzymatic Nucleic Acid
aacucugggccgaaaggcgagugaggucuuaaguuuu

SEQ ID NO: 18666 - RNA, 37 nt, Artificial Sequence
  Description of Artificial Sequence:  Enzymatic Nucleic Acid
caaccuaagccgaaaggcgagugaggucuucuggcua

SEQ ID NO: 18667 - RNA, 37 nt, Artificial Sequence
  Description of Artificial Sequence:  Enzymatic Nucleic Acid
ggagacaagccgaaaggcgagugaggucucuaacucu

SEQ ID NO: 18668 - RNA, 37 nt, Artificial Sequence
  Description of Artificial Sequence:  Enzymatic Nucleic Acid
ccuggagagccgaaaggcgagugaggucuaaccuaac

SEQ ID NO: 18669 - RNA, 37 nt, Artificial Sequence
  Description of Artificial Sequence:  Enzymatic Nucleic Acid
caucaugggccgaaaggcgagugaggucucuggagac

SEQ ID NO: 18670 - RNA, 37 nt, Artificial Sequence
  Description of Artificial Sequence:  Enzymatic Nucleic Acid
guguaagggccgaaaggcgagugaggucucaucaugg

SEQ ID NO: 18671 - RNA, 37 nt, Artificial Sequence
  Description of Artificial Sequence:  Enzymatic Nucleic Acid
gaaugugagccgaaaggcgagugaggucuauuuucag

SEQ ID NO: 18672 - RNA, 37 nt, Artificial Sequence
  Description of Artificial Sequence:  Enzymatic Nucleic Acid
uauuaauagccgaaaggcgagugaggucuccaaaaua

SEQ ID NO: 18673 - RNA, 37 nt, Artificial Sequence
  Description of Artificial Sequence:  Enzymatic Nucleic Acid
ugucuggagccgaaaggcgagugaggucuuauauauu

SEQ ID NO: 18674 - RNA, 37 nt, Artificial Sequence
  Description of Artificial Sequence:  Enzymatic Nucleic Acid
gaauaauagccgaaaggcgagugaggucucaagaaau

SEQ ID NO: 18675 - RNA, 37 nt, Artificial Sequence
  Description of Artificial Sequence:  Enzymatic Nucleic Acid
gugcaaaagccgaaaggcgagugaggucuagaauaau

SEQ ID NO: 18676 - RNA, 37 nt, Artificial Sequence
  Description of Artificial Sequence:  Enzymatic Nucleic Acid
uaacuguggccgaaaggcgagugaggucuaaaacaga

SEQ ID NO: 18677 - RNA, 37 nt, Artificial Sequence
  Description of Artificial Sequence:  Enzymatic Nucleic Acid
acaacuaagccgaaaggcgagugaggucuugugcaaa

SEQ ID NO: 18678 - RNA, 37 nt, Artificial Sequence
  Description of Artificial Sequence:  Enzymatic Nucleic Acid
uuucacaagccgaaaggcgagugaggucuuaacugug

SEQ ID NO: 18679 - RNA, 37 nt, Artificial Sequence
  Description of Artificial Sequence:  Enzymatic Nucleic Acid
uucuuucagccgaaaggcgagugaggucuaacuaacu

SEQ ID NO: 18680 - RNA, 37 nt, Artificial Sequence
  Description of Artificial Sequence:  Enzymatic Nucleic Acid
cuucucaggccgaaaggcgagugaggucuuuucuuuc

SEQ ID NO: 18681 - RNA, 37 nt, Artificial Sequence
  Description of Artificial Sequence:  Enzymatic Nucleic Acid
caggacuggccgaaaggcgagugaggucuauuuucau

SEQ ID NO: 18682 - RNA, 37 nt, Artificial Sequence
  Description of Artificial Sequence:  Enzymatic Nucleic Acid
ccucaggagccgaaaggcgagugaggucuugcauuuu

SEQ ID NO: 18683 - RNA, 37 nt, Artificial Sequence
  Description of Artificial Sequence:  Enzymatic Nucleic Acid
ggagaaaagccgaaaggcgagugaggucuucuccuca

SEQ ID NO: 18684 - RNA, 37 nt, Artificial Sequence
  Description of Artificial Sequence:  Enzymatic Nucleic Acid
uccaucaggccgaaaggcgagugaggucuccucguuu

SEQ ID NO: 18685 - RNA, 37 nt, Artificial Sequence
  Description of Artificial Sequence:  Enzymatic Nucleic Acid
cuuauugagccgaaaggcgagugaggucucuuuuucc

SEQ ID NO: 18686 - RNA, 37 nt, Artificial Sequence
  Description of Artificial Sequence:  Enzymatic Nucleic Acid
ucccuugagccgaaaggcgagugaggucucuuauuga

SEQ ID NO: 18687 - RNA, 37 nt, Artificial Sequence
  Description of Artificial Sequence:  Enzymatic Nucleic Acid
uauagagagccgaaaggcgagugaggucuggggucuu

SEQ ID NO: 18688 - RNA, 37 nt, Artificial Sequence
  Description of Artificial Sequence:  Enzymatic Nucleic Acid
ggucccaagccgaaaggcgagugaggucuuguguugg

SEQ ID NO: 18689 - RNA, 37 nt, Artificial Sequence
  Description of Artificial Sequence:  Enzymatic Nucleic Acid
gugacugagccgaaaggcgagugaggucuuuccugug

SEQ ID NO: 18690 - RNA, 37 nt, Artificial Sequence
  Description of Artificial Sequence:  Enzymatic Nucleic Acid
aaacgugagccgaaaggcgagugaggucuugacuucc

SEQ ID NO: 18691 - RNA, 37 nt, Artificial Sequence
  Description of Artificial Sequence:  Enzymatic Nucleic Acid
aaaggaaagccgaaaggcgagugaggucugugacuga

SEQ ID NO: 18692 - RNA, 37 nt, Artificial Sequence
  Description of Artificial Sequence:  Enzymatic Nucleic Acid
cucuuccagccgaaaggcgagugaggucuauccuuuc

SEQ ID NO: 18693 - RNA, 37 nt, Artificial Sequence
  Description of Artificial Sequence:  Enzymatic Nucleic Acid
agcuaauggccgaaaggcgagugaggucuucuuccac

SEQ ID NO: 18694 - RNA, 37 nt, Artificial Sequence
  Description of Artificial Sequence:  Enzymatic Nucleic Acid
ugcgccaggccgaaaggcgagugaggucuuaaugcuc

SEQ ID NO: 18695 - RNA, 37 nt, Artificial Sequence
  Description of Artificial Sequence:  Enzymatic Nucleic Acid
aauaugcggccgaaaggcgagugaggucucagcuaau

SEQ ID NO: 18696 - RNA, 37 nt, Artificial Sequence
  Description of Artificial Sequence:  Enzymatic Nucleic Acid
uuaauauggccgaaaggcgagugaggucugccagcua

SEQ ID NO: 18697 - RNA, 37 nt, Artificial Sequence
  Description of Artificial Sequence:  Enzymatic Nucleic Acid
uuaaaguggccgaaaggcgagugaggucuuuaauaug

SEQ ID NO: 18698 - RNA, 37 nt, Artificial Sequence
  Description of Artificial Sequence:  Enzymatic Nucleic Acid
ucaaggaggccgaaaggcgagugaggucuuuaaagug

SEQ ID NO: 18699 - RNA, 37 nt, Artificial Sequence
  Description of Artificial Sequence:  Enzymatic Nucleic Acid
ccuuuuuagccgaaaggcgagugaggucuucaaggag

SEQ ID NO: 18700 - RNA, 37 nt, Artificial Sequence
  Description of Artificial Sequence:  Enzymatic Nucleic Acid
acauaccagccgaaaggcgagugaggucucuuuuuac

SEQ ID NO: 18701 - RNA, 37 nt, Artificial Sequence
  Description of Artificial Sequence:  Enzymatic Nucleic Acid
auuacauagccgaaaggcgagugaggucucaccuuuu

SEQ ID NO: 18702 - RNA, 37 nt, Artificial Sequence
  Description of Artificial Sequence:  Enzymatic Nucleic Acid
auaaauuagccgaaaggcgagugaggucuauaccacc

SEQ ID NO: 18703 - RNA, 37 nt, Artificial Sequence
  Description of Artificial Sequence:  Enzymatic Nucleic Acid
auaccuuggccgaaaggcgagugaggucuauaaauua

SEQ ID NO: 18704 - RNA, 37 nt, Artificial Sequence
  Description of Artificial Sequence:  Enzymatic Nucleic Acid
gagaaauagccgaaaggcgagugaggucucuugcaua

SEQ ID NO: 18705 - RNA, 37 nt, Artificial Sequence
  Description of Artificial Sequence:  Enzymatic Nucleic Acid
agucccaagccgaaaggcgagugaggucuuggagaaa

SEQ ID NO: 18706 - RNA, 37 nt, Artificial Sequence
  Description of Artificial Sequence:  Enzymatic Nucleic Acid
cucauuaagccgaaaggcgagugaggucuuaauaucc

SEQ ID NO: 18707 - RNA, 37 nt, Artificial Sequence
  Description of Artificial Sequence:  Enzymatic Nucleic Acid
agugaugggccgaaaggcgagugaggucuucauuaac

SEQ ID NO: 18708 - RNA, 37 nt, Artificial Sequence
  Description of Artificial Sequence:  Enzymatic Nucleic Acid
aaaauggggccgaaaggcgagugaggucuuuuucuuc

SEQ ID NO: 18709 - RNA, 37 nt, Artificial Sequence
  Description of Artificial Sequence:  Enzymatic Nucleic Acid
uuucaaaggccgaaaggcgagugaggucuaguugaaa

SEQ ID NO: 18710 - RNA, 37 nt, Artificial Sequence
  Description of Artificial Sequence:  Enzymatic Nucleic Acid
accccagggccgaaaggcgagugaggucuaaguuuca

SEQ ID NO: 18711 - RNA, 37 nt, Artificial Sequence
  Description of Artificial Sequence:  Enzymatic Nucleic Acid
ugcucagagccgaaaggcgagugaggucucccaggca

SEQ ID NO: 18712 - RNA, 37 nt, Artificial Sequence
  Description of Artificial Sequence:  Enzymatic Nucleic Acid
ccaucauggccgaaaggcgagugaggucuucagaccc

SEQ ID NO: 18713 - RNA, 37 nt, Artificial Sequence
  Description of Artificial Sequence:  Enzymatic Nucleic Acid
cuuuccuagccgaaaggcgagugaggucuccugucuc

SEQ ID NO: 18714 - RNA, 37 nt, Artificial Sequence
  Description of Artificial Sequence:  Enzymatic Nucleic Acid
aguaggcggccgaaaggcgagugaggucuccuuuccu

SEQ ID NO: 18715 - RNA, 37 nt, Artificial Sequence
  Description of Artificial Sequence:  Enzymatic Nucleic Acid
agaguagggccgaaaggcgagugaggucugcccuuuc

SEQ ID NO: 18716 - RNA, 37 nt, Artificial Sequence
  Description of Artificial Sequence:  Enzymatic Nucleic Acid
ucuuuagagccgaaaggcgagugaggucuccugaaga

SEQ ID NO: 18717 - RNA, 37 nt, Artificial Sequence
  Description of Artificial Sequence:  Enzymatic Nucleic Acid
aaggcccagccgaaaggcgagugaggucuuugaucuu

SEQ ID NO: 18718 - RNA, 37 nt, Artificial Sequence
  Description of Artificial Sequence:  Enzymatic Nucleic Acid
auccaagggccgaaaggcgagugaggucuccacuuga

SEQ ID NO: 18719 - RNA, 37 nt, Artificial Sequence
  Description of Artificial Sequence:  Enzymatic Nucleic Acid
cagcuuaggccgaaaggcgagugaggucugauccaag

SEQ ID NO: 18720 - RNA, 37 nt, Artificial Sequence
  Description of Artificial Sequence:  Enzymatic Nucleic Acid
agagccaggccgaaaggcgagugaggucuuuagcgau

SEQ ID NO: 18721 - RNA, 37 nt, Artificial Sequence
  Description of Artificial Sequence:  Enzymatic Nucleic Acid
aaacagaggccgaaaggcgagugaggucucagcuuag

SEQ ID NO: 18722 - RNA, 37 nt, Artificial Sequence
  Description of Artificial Sequence:  Enzymatic Nucleic Acid
gcaucaaagccgaaaggcgagugaggucuagagccag

SEQ ID NO: 18723 - RNA, 37 nt, Artificial Sequence
  Description of Artificial Sequence:  Enzymatic Nucleic Acid
auaaauaggccgaaaggcgagugaggucuaucaaaca

SEQ ID NO: 18724 - RNA, 37 nt, Artificial Sequence
  Description of Artificial Sequence:  Enzymatic Nucleic Acid
cuaacuuggccgaaaggcgagugaggucuauaaauag

SEQ ID NO: 18725 - RNA, 37 nt, Artificial Sequence
  Description of Artificial Sequence:  Enzymatic Nucleic Acid
gacccuaagccgaaaggcgagugaggucuuugcauaa

SEQ ID NO: 18726 - RNA, 37 nt, Artificial Sequence
  Description of Artificial Sequence:  Enzymatic Nucleic Acid
uacauagagccgaaaggcgagugaggucuccuaacuu

SEQ ID NO: 18727 - RNA, 37 nt, Artificial Sequence
  Description of Artificial Sequence:  Enzymatic Nucleic Acid
ccuaaauagccgaaaggcgagugaggucuauagaccc

SEQ ID NO: 18728 - RNA, 37 nt, Artificial Sequence
  Description of Artificial Sequence:  Enzymatic Nucleic Acid
aguaggcggccgaaaggcgagugaggucuauccuaaa

SEQ ID NO: 18729 - RNA, 37 nt, Artificial Sequence
  Description of Artificial Sequence:  Enzymatic Nucleic Acid
agaguagggccgaaaggcgagugaggucugcauccua

SEQ ID NO: 18730 - RNA, 37 nt, Artificial Sequence
  Description of Artificial Sequence:  Enzymatic Nucleic Acid
ggugcagagccgaaaggcgagugaggucuauccuaaa

SEQ ID NO: 18731 - RNA, 37 nt, Artificial Sequence
  Description of Artificial Sequence:  Enzymatic Nucleic Acid
agaagguggccgaaaggcgagugaggucuagacaucc

SEQ ID NO: 18732 - RNA, 37 nt, Artificial Sequence
  Description of Artificial Sequence:  Enzymatic Nucleic Acid
acuggcuggccgaaaggcgagugaggucuagaaggug

SEQ ID NO: 18733 - RNA, 37 nt, Artificial Sequence
  Description of Artificial Sequence:  Enzymatic Nucleic Acid
cugacugggccgaaaggcgagugaggucuugcagaag

SEQ ID NO: 18734 - RNA, 37 nt, Artificial Sequence
  Description of Artificial Sequence:  Enzymatic Nucleic Acid
gcuucugagccgaaaggcgagugaggucuuggcugca

SEQ ID NO: 18735 - RNA, 37 nt, Artificial Sequence
  Description of Artificial Sequence:  Enzymatic Nucleic Acid
cucuccaggccgaaaggcgagugaggucuuucugacu

SEQ ID NO: 18736 - RNA, 37 nt, Artificial Sequence
  Description of Artificial Sequence:  Enzymatic Nucleic Acid
cacuguuggccgaaaggcgagugaggucucucuccag

SEQ ID NO: 18737 - RNA, 37 nt, Artificial Sequence
  Description of Artificial Sequence:  Enzymatic Nucleic Acid
gcaauccagccgaaaggcgagugaggucuuguugccu

SEQ ID NO: 18738 - RNA, 37 nt, Artificial Sequence
  Description of Artificial Sequence:  Enzymatic Nucleic Acid
agaagcaggccgaaaggcgagugaggucuaauccacu

SEQ ID NO: 18739 - RNA, 37 nt, Artificial Sequence
  Description of Artificial Sequence:  Enzymatic Nucleic Acid
ccaagaaggccgaaaggcgagugaggucuagcaaucc

SEQ ID NO: 18740 - RNA, 37 nt, Artificial Sequence
  Description of Artificial Sequence:  Enzymatic Nucleic Acid
gaagcauagccgaaaggcgagugaggucuucuucucc

SEQ ID NO: 18741 - RNA, 37 nt, Artificial Sequence
  Description of Artificial Sequence:  Enzymatic Nucleic Acid
aaaggaaggccgaaaggcgagugaggucuauacucuu

SEQ ID NO: 18742 - RNA, 37 nt, Artificial Sequence
  Description of Artificial Sequence:  Enzymatic Nucleic Acid
uuaaauuagccgaaaggcgagugaggucuauggauaa

SEQ ID NO: 18743 - RNA, 37 nt, Artificial Sequence
  Description of Artificial Sequence:  Enzymatic Nucleic Acid
agguucuagccgaaaggcgagugaggucuaguuaaau

SEQ ID NO: 18744 - RNA, 37 nt, Artificial Sequence
  Description of Artificial Sequence:  Enzymatic Nucleic Acid
acuuagaggccgaaaggcgagugaggucuucagguuc

SEQ ID NO: 18745 - RNA, 37 nt, Artificial Sequence
  Description of Artificial Sequence:  Enzymatic Nucleic Acid
uucgguuagccgaaaggcgagugaggucuuuagagcu

SEQ ID NO: 18746 - RNA, 37 nt, Artificial Sequence
  Description of Artificial Sequence:  Enzymatic Nucleic Acid
gaggcauagccgaaaggcgagugaggucuauucuucg

SEQ ID NO: 18747 - RNA, 37 nt, Artificial Sequence
  Description of Artificial Sequence:  Enzymatic Nucleic Acid
aacagagggccgaaaggcgagugaggucuauacauuc

SEQ ID NO: 18748 - RNA, 37 nt, Artificial Sequence
  Description of Artificial Sequence:  Enzymatic Nucleic Acid
cauaagaagccgaaaggcgagugaggucuagaggcau

SEQ ID NO: 18749 - RNA, 37 nt, Artificial Sequence
  Description of Artificial Sequence:  Enzymatic Nucleic Acid
auguggcagccgaaaggcgagugaggucuauaagaac

SEQ ID NO: 18750 - RNA, 37 nt, Artificial Sequence
  Description of Artificial Sequence:  Enzymatic Nucleic Acid
ggaugugggccgaaaggcgagugaggucuacauaaga

SEQ ID NO: 18751 - RNA, 37 nt, Artificial Sequence
  Description of Artificial Sequence:  Enzymatic Nucleic Acid
ccuuuaaagccgaaaggcgagugaggucuaaggaugu

SEQ ID NO: 18752 - RNA, 37 nt, Artificial Sequence
  Description of Artificial Sequence:  Enzymatic Nucleic Acid
acagagaggccgaaaggcgagugaggucucuuuaaac

SEQ ID NO: 18753 - RNA, 37 nt, Artificial Sequence
  Description of Artificial Sequence:  Enzymatic Nucleic Acid
ucuucauagccgaaaggcgagugaggucuagagagcc

SEQ ID NO: 18754 - RNA, 37 nt, Artificial Sequence
  Description of Artificial Sequence:  Enzymatic Nucleic Acid
gcugaugagccgaaaggcgagugaggucuggucccau

SEQ ID NO: 18755 - RNA, 37 nt, Artificial Sequence
  Description of Artificial Sequence:  Enzymatic Nucleic Acid
ggaauguggccgaaaggcgagugaggucuugaugacg

SEQ ID NO: 18756 - RNA, 37 nt, Artificial Sequence
  Description of Artificial Sequence:  Enzymatic Nucleic Acid
uaggcucagccgaaaggcgagugaggucuuagggaau

SEQ ID NO: 18757 - RNA, 37 nt, Artificial Sequence
  Description of Artificial Sequence:  Enzymatic Nucleic Acid
ccaguagggccgaaaggcgagugaggucuucacuagg

SEQ ID NO: 18758 - RNA, 37 nt, Artificial Sequence
  Description of Artificial Sequence:  Enzymatic Nucleic Acid
gccaggaggccgaaaggcgagugaggucucaguaggc

SEQ ID NO: 18759 - RNA, 37 nt, Artificial Sequence
  Description of Artificial Sequence:  Enzymatic Nucleic Acid
agccgcuggccgaaaggcgagugaggucucaggagcc

SEQ ID NO: 18760 - RNA, 37 nt, Artificial Sequence
  Description of Artificial Sequence:  Enzymatic Nucleic Acid
aaaagccggccgaaaggcgagugaggucuugccagga

SEQ ID NO: 18761 - RNA, 37 nt, Artificial Sequence
  Description of Artificial Sequence:  Enzymatic Nucleic Acid
cacaaaaggccgaaaggcgagugaggucucgcugcca

SEQ ID NO: 18762 - RNA, 37 nt, Artificial Sequence
  Description of Artificial Sequence:  Enzymatic Nucleic Acid
gucuuccagccgaaaggcgagugaggucuaaaagccg

SEQ ID NO: 18763 - RNA, 37 nt, Artificial Sequence
  Description of Artificial Sequence:  Enzymatic Nucleic Acid
ucuucugggccgaaaggcgagugaggucuuagugagu

SEQ ID NO: 18764 - RNA, 37 nt, Artificial Sequence
  Description of Artificial Sequence:  Enzymatic Nucleic Acid
cugucccagccgaaaggcgagugaggucuuccucucu

SEQ ID NO: 18765 - RNA, 37 nt, Artificial Sequence
  Description of Artificial Sequence:  Enzymatic Nucleic Acid
ggagaggagccgaaaggcgagugaggucuugucccac

SEQ ID NO: 18766 - RNA, 37 nt, Artificial Sequence
  Description of Artificial Sequence:  Enzymatic Nucleic Acid
cuagccuggccgaaaggcgagugaggucuuuuuguuu

SEQ ID NO: 18767 - RNA, 37 nt, Artificial Sequence
  Description of Artificial Sequence:  Enzymatic Nucleic Acid
ggcucuaggccgaaaggcgagugaggucucugcuuuu

SEQ ID NO: 18768 - RNA, 37 nt, Artificial Sequence
  Description of Artificial Sequence:  Enzymatic Nucleic Acid
ucuucugggccgaaaggcgagugaggucuucuagccu

SEQ ID NO: 18769 - RNA, 37 nt, Artificial Sequence
  Description of Artificial Sequence:  Enzymatic Nucleic Acid
aggaacaagccgaaaggcgagugaggucuaaagauuu

SEQ ID NO: 18770 - RNA, 37 nt, Artificial Sequence
  Description of Artificial Sequence:  Enzymatic Nucleic Acid
aagaggaagccgaaaggcgagugaggucuaacaaaga

SEQ ID NO: 18771 - RNA, 37 nt, Artificial Sequence
  Description of Artificial Sequence:  Enzymatic Nucleic Acid
gugguuuggccgaaaggcgagugaggucuguaugugu

SEQ ID NO: 18772 - RNA, 37 nt, Artificial Sequence
  Description of Artificial Sequence:  Enzymatic Nucleic Acid
agcugucagccgaaaggcgagugaggucuaggugguu

SEQ ID NO: 18773 - RNA, 37 nt, Artificial Sequence
  Description of Artificial Sequence:  Enzymatic Nucleic Acid
auugccaggccgaaaggcgagugaggucuugucacag

SEQ ID NO: 18774 - RNA, 37 nt, Artificial Sequence
  Description of Artificial Sequence:  Enzymatic Nucleic Acid
uaaaauuggccgaaaggcgagugaggucucagcuguc

SEQ ID NO: 18775 - RNA, 37 nt, Artificial Sequence
  Description of Artificial Sequence:  Enzymatic Nucleic Acid
uccaguuagccgaaaggcgagugaggucucugauuua

SEQ ID NO: 18776 - RNA, 37 nt, Artificial Sequence
  Description of Artificial Sequence:  Enzymatic Nucleic Acid
gaguuuaagccgaaaggcgagugaggucucuccuucc

SEQ ID NO: 18777 - RNA, 37 nt, Artificial Sequence
  Description of Artificial Sequence:  Enzymatic Nucleic Acid
agaauugagccgaaaggcgagugaggucuugaggucu

SEQ ID NO: 18778 - RNA, 37 nt, Artificial Sequence
  Description of Artificial Sequence:  Enzymatic Nucleic Acid
uugcuggggccgaaaggcgagugaggucuuauuaucu

SEQ ID NO: 18779 - RNA, 37 nt, Artificial Sequence
  Description of Artificial Sequence:  Enzymatic Nucleic Acid
acuauuuggccgaaaggcgagugaggucuugggcuau

SEQ ID NO: 18780 - RNA, 37 nt, Artificial Sequence
  Description of Artificial Sequence:  Enzymatic Nucleic Acid
uguuaucagccgaaaggcgagugaggucuuauuugcu

SEQ ID NO: 18781 - RNA, 37 nt, Artificial Sequence
  Description of Artificial Sequence:  Enzymatic Nucleic Acid
augaacaggccgaaaggcgagugaggucuuaagguuu

SEQ ID NO: 18782 - RNA, 37 nt, Artificial Sequence
  Description of Artificial Sequence:  Enzymatic Nucleic Acid
gacaugaagccgaaaggcgagugaggucuagcuaagg

SEQ ID NO: 18783 - RNA, 37 nt, Artificial Sequence
  Description of Artificial Sequence:  Enzymatic Nucleic Acid
aaucaagagccgaaaggcgagugaggucuaugaacag

SEQ ID NO: 18784 - RNA, 37 nt, Artificial Sequence
  Description of Artificial Sequence:  Enzymatic Nucleic Acid
ugguuuuggccgaaaggcgagugaggucuuuuucucu

SEQ ID NO: 18785 - RNA, 37 nt, Artificial Sequence
  Description of Artificial Sequence:  Enzymatic Nucleic Acid
cugaguaagccgaaaggcgagugaggucuaauucuaa

SEQ ID NO: 18786 - RNA, 37 nt, Artificial Sequence
  Description of Artificial Sequence:  Enzymatic Nucleic Acid
ugaaggaggccgaaaggcgagugaggucuugaguaac

SEQ ID NO: 18787 - RNA, 37 nt, Artificial Sequence
  Description of Artificial Sequence:  Enzymatic Nucleic Acid
gcuacaaagccgaaaggcgagugaggucucugaguuu

SEQ ID NO: 18788 - RNA, 37 nt, Artificial Sequence
  Description of Artificial Sequence:  Enzymatic Nucleic Acid
guaugcuagccgaaaggcgagugaggucuaaaccuga

SEQ ID NO: 18789 - RNA, 37 nt, Artificial Sequence
  Description of Artificial Sequence:  Enzymatic Nucleic Acid
cauguauggccgaaaggcgagugaggucuuacaaacc

SEQ ID NO: 18790 - RNA, 37 nt, Artificial Sequence
  Description of Artificial Sequence:  Enzymatic Nucleic Acid
uggauggagccgaaaggcgagugaggucuucauguau

SEQ ID NO: 18791 - RNA, 37 nt, Artificial Sequence
  Description of Artificial Sequence:  Enzymatic Nucleic Acid
uucuuugagccgaaaggcgagugaggucuugauggau

SEQ ID NO: 18792 - RNA, 37 nt, Artificial Sequence
  Description of Artificial Sequence:  Enzymatic Nucleic Acid
agauggaagccgaaaggcgagugaggucucauucuuu

SEQ ID NO: 18793 - RNA, 37 nt, Artificial Sequence
  Description of Artificial Sequence:  Enzymatic Nucleic Acid
cauuaagagccgaaaggcgagugaggucuuccagaug

SEQ ID NO: 18794 - RNA, 37 nt, Artificial Sequence
  Description of Artificial Sequence:  Enzymatic Nucleic Acid
ucuuucuagccgaaaggcgagugaggucuauuaagac

SEQ ID NO: 18795 - RNA, 37 nt, Artificial Sequence
  Description of Artificial Sequence:  Enzymatic Nucleic Acid
cauuauuagccgaaaggcgagugaggucuaagucucc

SEQ ID NO: 18796 - RNA, 37 nt, Artificial Sequence
  Description of Artificial Sequence:  Enzymatic Nucleic Acid
guaacuaggccgaaaggcgagugaggucuucauuauu

SEQ ID NO: 18797 - RNA, 37 nt, Artificial Sequence
  Description of Artificial Sequence:  Enzymatic Nucleic Acid
cuuuguaagccgaaaggcgagugaggucuuagcucau

SEQ ID NO: 18798 - RNA, 37 nt, Artificial Sequence
  Description of Artificial Sequence:  Enzymatic Nucleic Acid
aacaagcagccgaaaggcgagugaggucuuuuguaac

SEQ ID NO: 18799 - RNA, 37 nt, Artificial Sequence
  Description of Artificial Sequence:  Enzymatic Nucleic Acid
ugaacaaggccgaaaggcgagugaggucuacuuugua

SEQ ID NO: 18800 - RNA, 37 nt, Artificial Sequence
  Description of Artificial Sequence:  Enzymatic Nucleic Acid
uuaaugaagccgaaaggcgagugaggucuaagcacuu

SEQ ID NO: 18801 - RNA, 37 nt, Artificial Sequence
  Description of Artificial Sequence:  Enzymatic Nucleic Acid
uuucaguggccgaaaggcgagugaggucuuauuuuaa

SEQ ID NO: 18802 - RNA, 37 nt, Artificial Sequence
  Description of Artificial Sequence:  Enzymatic Nucleic Acid
auaaaugggccgaaaggcgagugaggucuaaaugauu

SEQ ID NO: 18803 - RNA, 37 nt, Artificial Sequence
  Description of Artificial Sequence:  Enzymatic Nucleic Acid
agugccaagccgaaaggcgagugaggucucauuuuug

SEQ ID NO: 18804 - RNA, 37 nt, Artificial Sequence
  Description of Artificial Sequence:  Enzymatic Nucleic Acid
uguuaguggccgaaaggcgagugaggucucaaccauu

SEQ ID NO: 18805 - RNA, 37 nt, Artificial Sequence
  Description of Artificial Sequence:  Enzymatic Nucleic Acid
aggaaguggccgaaaggcgagugaggucuucguucuu

SEQ ID NO: 18806 - RNA, 37 nt, Artificial Sequence
  Description of Artificial Sequence:  Enzymatic Nucleic Acid
cucagaaagccgaaaggcgagugaggucuucugaaag

SEQ ID NO: 18807 - RNA, 37 nt, Artificial Sequence
  Description of Artificial Sequence:  Enzymatic Nucleic Acid
uccacguagccgaaaggcgagugaggucuauuaucuc

SEQ ID NO: 18808 - RNA, 37 nt, Artificial Sequence
  Description of Artificial Sequence:  Enzymatic Nucleic Acid
cuguuccagccgaaaggcgagugaggucuguacauua

SEQ ID NO: 18809 - RNA, 37 nt, Artificial Sequence
  Description of Artificial Sequence:  Enzymatic Nucleic Acid
cacccagagccgaaaggcgagugaggucuuguuccac

SEQ ID NO: 18810 - RNA, 37 nt, Artificial Sequence
  Description of Artificial Sequence:  Enzymatic Nucleic Acid
ccauuccagccgaaaggcgagugaggucuccagacug

SEQ ID NO: 18811 - RNA, 37 nt, Artificial Sequence
  Description of Artificial Sequence:  Enzymatic Nucleic Acid
gguuucaggccgaaaggcgagugaggucucccauucc

SEQ ID NO: 18812 - RNA, 37 nt, Artificial Sequence
  Description of Artificial Sequence:  Enzymatic Nucleic Acid
gacuugcagccgaaaggcgagugaggucuaugguuuc

SEQ ID NO: 18813 - RNA, 37 nt, Artificial Sequence
  Description of Artificial Sequence:  Enzymatic Nucleic Acid
cagacuuggccgaaaggcgagugaggucuacaugguu

SEQ ID NO: 18814 - RNA, 37 nt, Artificial Sequence
  Description of Artificial Sequence:  Enzymatic Nucleic Acid
gacacagagccgaaaggcgagugaggucuuugcacau

SEQ ID NO: 18815 - RNA, 37 nt, Artificial Sequence
  Description of Artificial Sequence:  Enzymatic Nucleic Acid
acaagacagccgaaaggcgagugaggucuagacuugc

SEQ ID NO: 18816 - RNA, 37 nt, Artificial Sequence
  Description of Artificial Sequence:  Enzymatic Nucleic Acid
ugacaagagccgaaaggcgagugaggucuacagacuu

SEQ ID NO: 18817 - RNA, 37 nt, Artificial Sequence
  Description of Artificial Sequence:  Enzymatic Nucleic Acid
uggacugagccgaaaggcgagugaggucuaagacaca

SEQ ID NO: 18818 - RNA, 37 nt, Artificial Sequence
  Description of Artificial Sequence:  Enzymatic Nucleic Acid
uucuuggagccgaaaggcgagugaggucuugacaaga

SEQ ID NO: 18819 - RNA, 37 nt, Artificial Sequence
  Description of Artificial Sequence:  Enzymatic Nucleic Acid
cggugucagccgaaaggcgagugaggucuuucuugga

SEQ ID NO: 18820 - RNA, 37 nt, Artificial Sequence
  Description of Artificial Sequence:  Enzymatic Nucleic Acid
aaaauuaagccgaaaggcgagugaggucuaucucggu

SEQ ID NO: 18821 - RNA, 37 nt, Artificial Sequence
  Description of Artificial Sequence:  Enzymatic Nucleic Acid
acaaggcagccgaaaggcgagugaggucugggucccu

SEQ ID NO: 18822 - RNA, 37 nt, Artificial Sequence
  Description of Artificial Sequence:  Enzymatic Nucleic Acid
aaacaagggccgaaaggcgagugaggucuacgggucc

SEQ ID NO: 18823 - RNA, 37 nt, Artificial Sequence
  Description of Artificial Sequence:  Enzymatic Nucleic Acid
cuaggaaagccgaaaggcgagugaggucuaaggcacg

SEQ ID NO: 18824 - RNA, 37 nt, Artificial Sequence
  Description of Artificial Sequence:  Enzymatic Nucleic Acid
cuuguggggccgaaaggcgagugaggucuuaggaaac

SEQ ID NO: 18825 - RNA, 37 nt, Artificial Sequence
  Description of Artificial Sequence:  Enzymatic Nucleic Acid
gauguuuggccgaaaggcgagugaggucuauucuugu

SEQ ID NO: 18826 - RNA, 37 nt, Artificial Sequence
  Description of Artificial Sequence:  Enzymatic Nucleic Acid
gaggcuaggccgaaaggcgagugaggucugaguaucu

SEQ ID NO: 18827 - RNA, 37 nt, Artificial Sequence
  Description of Artificial Sequence:  Enzymatic Nucleic Acid
aaaugagggccgaaaggcgagugaggucuuagcgagu

SEQ ID NO: 18828 - RNA, 37 nt, Artificial Sequence
  Description of Artificial Sequence:  Enzymatic Nucleic Acid
aagaugcagccgaaaggcgagugaggucuuccuccuu

SEQ ID NO: 18829 - RNA, 37 nt, Artificial Sequence
  Description of Artificial Sequence:  Enzymatic Nucleic Acid
caaagauggccgaaaggcgagugaggucuacuccucc

SEQ ID NO: 18830 - RNA, 37 nt, Artificial Sequence
  Description of Artificial Sequence:  Enzymatic Nucleic Acid
acugucgggccgaaaggcgagugaggucucaaagaug

SEQ ID NO: 18831 - RNA, 37 nt, Artificial Sequence
  Description of Artificial Sequence:  Enzymatic Nucleic Acid
uuacaccagccgaaaggcgagugaggucuugucggcc

SEQ ID NO: 18832 - RNA, 37 nt, Artificial Sequence
  Description of Artificial Sequence:  Enzymatic Nucleic Acid
caguuacagccgaaaggcgagugaggucucacugucg

SEQ ID NO: 18833 - RNA, 37 nt, Artificial Sequence
  Description of Artificial Sequence:  Enzymatic Nucleic Acid
cacaguuagccgaaaggcgagugaggucuaccacugu

SEQ ID NO: 18834 - RNA, 37 nt, Artificial Sequence
  Description of Artificial Sequence:  Enzymatic Nucleic Acid
cacacacagccgaaaggcgagugaggucuaguuacac

SEQ ID NO: 18835 - RNA, 37 nt, Artificial Sequence
  Description of Artificial Sequence:  Enzymatic Nucleic Acid
cacacacagccgaaaggcgagugaggucuacaguuac

SEQ ID NO: 18836 - RNA, 37 nt, Artificial Sequence
  Description of Artificial Sequence:  Enzymatic Nucleic Acid
cacacacagccgaaaggcgagugaggucuacacaguu

SEQ ID NO: 18837 - RNA, 37 nt, Artificial Sequence
  Description of Artificial Sequence:  Enzymatic Nucleic Acid
cacacacagccgaaaggcgagugaggucuacacacag

SEQ ID NO: 18838 - RNA, 37 nt, Artificial Sequence
  Description of Artificial Sequence:  Enzymatic Nucleic Acid
cacacacagccgaaaggcgagugaggucuacacacac

SEQ ID NO: 18839 - RNA, 37 nt, Artificial Sequence
  Description of Artificial Sequence:  Enzymatic Nucleic Acid
cccacacagccgaaaggcgagugaggucuacacacac

SEQ ID NO: 18840 - RNA, 37 nt, Artificial Sequence
  Description of Artificial Sequence:  Enzymatic Nucleic Acid
cacccacagccgaaaggcgagugaggucuacacacac

SEQ ID NO: 18841 - RNA, 37 nt, Artificial Sequence
  Description of Artificial Sequence:  Enzymatic Nucleic Acid
cacacccagccgaaaggcgagugaggucuacacacac

SEQ ID NO: 18842 - RNA, 37 nt, Artificial Sequence
  Description of Artificial Sequence:  Enzymatic Nucleic Acid
cacccacagccgaaaggcgagugaggucuccacacac

SEQ ID NO: 18843 - RNA, 37 nt, Artificial Sequence
  Description of Artificial Sequence:  Enzymatic Nucleic Acid
uacacccagccgaaaggcgagugaggucuacccacac

SEQ ID NO: 18844 - RNA, 37 nt, Artificial Sequence
  Description of Artificial Sequence:  Enzymatic Nucleic Acid
cacauacagccgaaaggcgagugaggucuccacaccc

SEQ ID NO: 18845 - RNA, 37 nt, Artificial Sequence
  Description of Artificial Sequence:  Enzymatic Nucleic Acid
cacacauagccgaaaggcgagugaggucuacccacac

SEQ ID NO: 18846 - RNA, 37 nt, Artificial Sequence
  Description of Artificial Sequence:  Enzymatic Nucleic Acid
aaaacacagccgaaaggcgagugaggucuauacaccc

SEQ ID NO: 18847 - RNA, 37 nt, Artificial Sequence
  Description of Artificial Sequence:  Enzymatic Nucleic Acid
acaaaacagccgaaaggcgagugaggucuacauacac

SEQ ID NO: 18848 - RNA, 37 nt, Artificial Sequence
  Description of Artificial Sequence:  Enzymatic Nucleic Acid
gcacaaaagccgaaaggcgagugaggucuacacauac

SEQ ID NO: 18849 - RNA, 37 nt, Artificial Sequence
  Description of Artificial Sequence:  Enzymatic Nucleic Acid
guuaugcagccgaaaggcgagugaggucuaaaacaca

SEQ ID NO: 18850 - RNA, 37 nt, Artificial Sequence
  Description of Artificial Sequence:  Enzymatic Nucleic Acid
uaguuauggccgaaaggcgagugaggucuacaaaaca

SEQ ID NO: 18851 - RNA, 37 nt, Artificial Sequence
  Description of Artificial Sequence:  Enzymatic Nucleic Acid
aaaaguaagccgaaaggcgagugaggucuuuuaaaau

SEQ ID NO: 18852 - RNA, 37 nt, Artificial Sequence
  Description of Artificial Sequence:  Enzymatic Nucleic Acid
aucuguaggccgaaaggcgagugaggucuauauauuc

SEQ ID NO: 18853 - RNA, 37 nt, Artificial Sequence
  Description of Artificial Sequence:  Enzymatic Nucleic Acid
ggaccaaagccgaaaggcgagugaggucucaugucug

SEQ ID NO: 18854 - RNA, 37 nt, Artificial Sequence
  Description of Artificial Sequence:  Enzymatic Nucleic Acid
auauaggagccgaaaggcgagugaggucucaaaccau

SEQ ID NO: 18855 - RNA, 37 nt, Artificial Sequence
  Description of Artificial Sequence:  Enzymatic Nucleic Acid
caucaugagccgaaaggcgagugaggucuuagaaaua

SEQ ID NO: 18856 - RNA, 37 nt, Artificial Sequence
  Description of Artificial Sequence:  Enzymatic Nucleic Acid
acaaaauagccgaaaggcgagugaggucuauucauca

SEQ ID NO: 18857 - RNA, 37 nt, Artificial Sequence
  Description of Artificial Sequence:  Enzymatic Nucleic Acid
augguauagccgaaaggcgagugaggucuaaaauaca

SEQ ID NO: 18858 - RNA, 37 nt, Artificial Sequence
  Description of Artificial Sequence:  Enzymatic Nucleic Acid
uacgauuagccgaaaggcgagugaggucuaaauccca

SEQ ID NO: 18859 - RNA, 37 nt, Artificial Sequence
  Description of Artificial Sequence:  Enzymatic Nucleic Acid
aguugguagccgaaaggcgagugaggucugauuacaa

SEQ ID NO: 18860 - RNA, 37 nt, Artificial Sequence
  Description of Artificial Sequence:  Enzymatic Nucleic Acid
agcaguuggccgaaaggcgagugaggucucaaguuua

SEQ ID NO: 18861 - RNA, 37 nt, Artificial Sequence
  Description of Artificial Sequence:  Enzymatic Nucleic Acid
cauaaaaggccgaaaggcgagugaggucuaguugcca

SEQ ID NO: 18862 - RNA, 37 nt, Artificial Sequence
  Description of Artificial Sequence:  Enzymatic Nucleic Acid
agacagaagccgaaaggcgagugaggucuauaaaagc

SEQ ID NO: 18863 - RNA, 37 nt, Artificial Sequence
  Description of Artificial Sequence:  Enzymatic Nucleic Acid
gaaggagagccgaaaggcgagugaggucuagaacaua

SEQ ID NO: 18864 - RNA, 37 nt, Artificial Sequence
  Description of Artificial Sequence:  Enzymatic Nucleic Acid
aaaaagaggccgaaaggcgagugaggucuuuuuucuu

SEQ ID NO: 18865 - RNA, 37 nt, Artificial Sequence
  Description of Artificial Sequence:  Enzymatic Nucleic Acid
gcucuaaagccgaaaggcgagugaggucuaaggauaa

SEQ ID NO: 18866 - RNA, 37 nt, Artificial Sequence
  Description of Artificial Sequence:  Enzymatic Nucleic Acid
uuucucuggccgaaaggcgagugaggucuucuaaaca

SEQ ID NO: 18867 - RNA, 37 nt, Artificial Sequence
  Description of Artificial Sequence:  Enzymatic Nucleic Acid
uuuugagagccgaaaggcgagugaggucucauuucaa

SEQ ID NO: 18868 - RNA, 37 nt, Artificial Sequence
  Description of Artificial Sequence:  Enzymatic Nucleic Acid
auauuuaggccgaaaggcgagugaggucuaauuuuuu

SEQ ID NO: 18869 - RNA, 37 nt, Artificial Sequence
  Description of Artificial Sequence:  Enzymatic Nucleic Acid
uaaacuaagccgaaaggcgagugaggucuauuuaguu

SEQ ID NO: 18870 - RNA, 37 nt, Artificial Sequence
  Description of Artificial Sequence:  Enzymatic Nucleic Acid
cagcuaaagccgaaaggcgagugaggucuuaacauuu

SEQ ID NO: 18871 - RNA, 37 nt, Artificial Sequence
  Description of Artificial Sequence:  Enzymatic Nucleic Acid
acaaucaggccgaaaggcgagugaggucuuaaacuaa

SEQ ID NO: 18872 - RNA, 37 nt, Artificial Sequence
  Description of Artificial Sequence:  Enzymatic Nucleic Acid
accccauagccgaaaggcgagugaggucuaaucagcu

SEQ ID NO: 18873 - RNA, 37 nt, Artificial Sequence
  Description of Artificial Sequence:  Enzymatic Nucleic Acid
uucgaaaagccgaaaggcgagugaggucucccauaca

SEQ ID NO: 18874 - RNA, 37 nt, Artificial Sequence
  Description of Artificial Sequence:  Enzymatic Nucleic Acid
aaaacaaagccgaaaggcgagugaggucuaaaaagug

SEQ ID NO: 18875 - RNA, 37 nt, Artificial Sequence
  Description of Artificial Sequence:  Enzymatic Nucleic Acid
agguaaaagccgaaaggcgagugaggucuaaacaaaa

SEQ ID NO: 18876 - RNA, 37 nt, Artificial Sequence
  Description of Artificial Sequence:  Enzymatic Nucleic Acid
aauuuacagccgaaaggcgagugaggucuaguuguga

SEQ ID NO: 18877 - RNA, 37 nt, Artificial Sequence
  Description of Artificial Sequence:  Enzymatic Nucleic Acid
gcaauuuagccgaaaggcgagugaggucuacaguugu

SEQ ID NO: 18878 - RNA, 37 nt, Artificial Sequence
  Description of Artificial Sequence:  Enzymatic Nucleic Acid
auuauugggccgaaaggcgagugaggucuaauuuaca

SEQ ID NO: 18879 - RNA, 37 nt, Artificial Sequence
  Description of Artificial Sequence:  Enzymatic Nucleic Acid
uucauggagccgaaaggcgagugaggucuaggaauua

SEQ ID NO: 18880 - RNA, 37 nt, Artificial Sequence
  Description of Artificial Sequence:  Enzymatic Nucleic Acid
auaauuuggccgaaaggcgagugaggucuauuuucau

SEQ ID NO: 18881 - RNA, 37 nt, Artificial Sequence
  Description of Artificial Sequence:  Enzymatic Nucleic Acid
uaucuacagccgaaaggcgagugaggucuuggauaau

SEQ ID NO: 18882 - RNA, 37 nt, Artificial Sequence
  Description of Artificial Sequence:  Enzymatic Nucleic Acid
uauaucuagccgaaaggcgagugaggucuacuggaua

SEQ ID NO: 18883 - RNA, 37 nt, Artificial Sequence
  Description of Artificial Sequence:  Enzymatic Nucleic Acid
aaaacuaggccgaaaggcgagugaggucucaauaucc

SEQ ID NO: 18884 - RNA, 37 nt, Artificial Sequence
  Description of Artificial Sequence:  Enzymatic Nucleic Acid
aggcaaaagccgaaaggcgagugaggucuuagccaau

SEQ ID NO: 18885 - RNA, 37 nt, Artificial Sequence
  Description of Artificial Sequence:  Enzymatic Nucleic Acid
aauaaagggccgaaaggcgagugaggucuaaaacuag

SEQ ID NO: 18886 - RNA, 37 nt, Artificial Sequence
  Description of Artificial Sequence:  Enzymatic Nucleic Acid
ugaauuuggccgaaaggcgagugaggucuuuaauaaa

SEQ ID NO: 18887 - RNA, 37 nt, Artificial Sequence
  Description of Artificial Sequence:  Enzymatic Nucleic Acid
cauucagggccgaaaggcgagugaggucuugaaauga

SEQ ID NO: 18888 - RNA, 37 nt, Artificial Sequence
  Description of Artificial Sequence:  Enzymatic Nucleic Acid
uaggcagagccgaaaggcgagugaggucuauucaggc

SEQ ID NO: 18889 - RNA, 37 nt, Artificial Sequence
  Description of Artificial Sequence:  Enzymatic Nucleic Acid
uauauagggccgaaaggcgagugaggucuagacauuc

SEQ ID NO: 18890 - RNA, 37 nt, Artificial Sequence
  Description of Artificial Sequence:  Enzymatic Nucleic Acid
acaaagaggccgaaaggcgagugaggucuagagaaua

SEQ ID NO: 18891 - RNA, 37 nt, Artificial Sequence
  Description of Artificial Sequence:  Enzymatic Nucleic Acid
ggagaauagccgaaaggcgagugaggucuaaagagca

SEQ ID NO: 18892 - RNA, 37 nt, Artificial Sequence
  Description of Artificial Sequence:  Enzymatic Nucleic Acid
uguuuuaagccgaaaggcgagugaggucuggguucaa

SEQ ID NO: 18893 - RNA, 37 nt, Artificial Sequence
  Description of Artificial Sequence:  Enzymatic Nucleic Acid
gagugccagccgaaaggcgagugaggucuaggauguu

SEQ ID NO: 18894 - DNA, 31 bp, Artificial Sequence
  Description of Artificial Sequence:  Enzymatic Nucleic Acid
tcccggggggctagctacaacgacccgggac

SEQ ID NO: 18895 - DNA, 31 bp, Artificial Sequence
  Description of Artificial Sequence:  Enzymatic Nucleic Acid
actgaccgggctagctacaacgatctcccgg

SEQ ID NO: 18896 - DNA, 31 bp, Artificial Sequence
  Description of Artificial Sequence:  Enzymatic Nucleic Acid
cacactgaggctagctacaacgacgctctcc

SEQ ID NO: 18897 - DNA, 31 bp, Artificial Sequence
  Description of Artificial Sequence:  Enzymatic Nucleic Acid
accacacaggctagctacaacgatgaccgct

SEQ ID NO: 18898 - DNA, 31 bp, Artificial Sequence
  Description of Artificial Sequence:  Enzymatic Nucleic Acid
cgaccacaggctagctacaacgaactgaccg

SEQ ID NO: 18899 - DNA, 31 bp, Artificial Sequence
  Description of Artificial Sequence:  Enzymatic Nucleic Acid
agcgaccaggctagctacaacgaacactgac

SEQ ID NO: 18900 - DNA, 31 bp, Artificial Sequence
  Description of Artificial Sequence:  Enzymatic Nucleic Acid
cgcagcgaggctagctacaacgacacacact

SEQ ID NO: 18901 - DNA, 31 bp, Artificial Sequence
  Description of Artificial Sequence:  Enzymatic Nucleic Acid
aaacgcagggctagctacaacgagaccacac

SEQ ID NO: 18902 - DNA, 31 bp, Artificial Sequence
  Description of Artificial Sequence:  Enzymatic Nucleic Acid
aggaaacgggctagctacaacgaagcgacca

SEQ ID NO: 18903 - DNA, 31 bp, Artificial Sequence
  Description of Artificial Sequence:  Enzymatic Nucleic Acid
agaggaaaggctagctacaacgagcagcgac

SEQ ID NO: 18904 - DNA, 31 bp, Artificial Sequence
  Description of Artificial Sequence:  Enzymatic Nucleic Acid
ggcgcaggggctagctacaacgaagaggaaa

SEQ ID NO: 18905 - DNA, 31 bp, Artificial Sequence
  Description of Artificial Sequence:  Enzymatic Nucleic Acid
gcccggcgggctagctacaacgaaggcagag

SEQ ID NO: 18906 - DNA, 31 bp, Artificial Sequence
  Description of Artificial Sequence:  Enzymatic Nucleic Acid
atgcccggggctagctacaacgagcaggcag

SEQ ID NO: 18907 - DNA, 31 bp, Artificial Sequence
  Description of Artificial Sequence:  Enzymatic Nucleic Acid
aagtgatgggctagctacaacgaccggcgca

SEQ ID NO: 18908 - DNA, 31 bp, Artificial Sequence
  Description of Artificial Sequence:  Enzymatic Nucleic Acid
gcaagtgaggctagctacaacgagcccggcg

SEQ ID NO: 18909 - DNA, 31 bp, Artificial Sequence
  Description of Artificial Sequence:  Enzymatic Nucleic Acid
cgcgcaagggctagctacaacgagatgcccg

SEQ ID NO: 18910 - DNA, 31 bp, Artificial Sequence
  Description of Artificial Sequence:  Enzymatic Nucleic Acid
gcggcgcgggctagctacaacgaaagtgatg

SEQ ID NO: 18911 - DNA, 31 bp, Artificial Sequence
  Description of Artificial Sequence:  Enzymatic Nucleic Acid
ctgcggcgggctagctacaacgagcaagtga

SEQ ID NO: 18912 - DNA, 31 bp, Artificial Sequence
  Description of Artificial Sequence:  Enzymatic Nucleic Acid
ttctgcggggctagctacaacgagcgcaagt

SEQ ID NO: 18913 - DNA, 31 bp, Artificial Sequence
  Description of Artificial Sequence:  Enzymatic Nucleic Acid
actttctgggctagctacaacgaggcgcgca

SEQ ID NO: 18914 - DNA, 31 bp, Artificial Sequence
  Description of Artificial Sequence:  Enzymatic Nucleic Acid
cagacggaggctagctacaacgatttctgcg

SEQ ID NO: 18915 - DNA, 31 bp, Artificial Sequence
  Description of Artificial Sequence:  Enzymatic Nucleic Acid
ctgccagaggctagctacaacgaggactttc

SEQ ID NO: 18916 - DNA, 31 bp, Artificial Sequence
  Description of Artificial Sequence:  Enzymatic Nucleic Acid
ccaggctgggctagctacaacgacagacgga

SEQ ID NO: 18917 - DNA, 31 bp, Artificial Sequence
  Description of Artificial Sequence:  Enzymatic Nucleic Acid
tatccaggggctagctacaacgatgccagac

SEQ ID NO: 18918 - DNA, 31 bp, Artificial Sequence
  Description of Artificial Sequence:  Enzymatic Nucleic Acid
agaggataggctagctacaacgaccaggctg

SEQ ID NO: 18919 - DNA, 31 bp, Artificial Sequence
  Description of Artificial Sequence:  Enzymatic Nucleic Acid
ggagaggaggctagctacaacgaatccaggc

SEQ ID NO: 18920 - DNA, 31 bp, Artificial Sequence
  Description of Artificial Sequence:  Enzymatic Nucleic Acid
ggtgccggggctagctacaacgaaggagagg

SEQ ID NO: 18921 - DNA, 31 bp, Artificial Sequence
  Description of Artificial Sequence:  Enzymatic Nucleic Acid
tgcgggtgggctagctacaacgacggtagga

SEQ ID NO: 18922 - DNA, 31 bp, Artificial Sequence
  Description of Artificial Sequence:  Enzymatic Nucleic Acid
tctgcgggggctagctacaacgagccggtag

SEQ ID NO: 18923 - DNA, 31 bp, Artificial Sequence
  Description of Artificial Sequence:  Enzymatic Nucleic Acid
ggcgtctgggctagctacaacgagggtgccg

SEQ ID NO: 18924 - DNA, 31 bp, Artificial Sequence
  Description of Artificial Sequence:  Enzymatic Nucleic Acid
caggggcgggctagctacaacgactgcgggt

SEQ ID NO: 18925 - DNA, 31 bp, Artificial Sequence
  Description of Artificial Sequence:  Enzymatic Nucleic Acid
tgcaggggggctagctacaacgagtctgcgg

SEQ ID NO: 18926 - DNA, 31 bp, Artificial Sequence
  Description of Artificial Sequence:  Enzymatic Nucleic Acid
ggcggctgggctagctacaacgaaggggcgt

SEQ ID NO: 18927 - DNA, 31 bp, Artificial Sequence
  Description of Artificial Sequence:  Enzymatic Nucleic Acid
accggcggggctagctacaacgatgcagggg

SEQ ID NO: 18928 - DNA, 31 bp, Artificial Sequence
  Description of Artificial Sequence:  Enzymatic Nucleic Acid
ccgaccggggctagctacaacgaggctgcag

SEQ ID NO: 18929 - DNA, 31 bp, Artificial Sequence
  Description of Artificial Sequence:  Enzymatic Nucleic Acid
ggcgccgaggctagctacaacgacggcggct

SEQ ID NO: 18930 - DNA, 31 bp, Artificial Sequence
  Description of Artificial Sequence:  Enzymatic Nucleic Acid
cccgggcgggctagctacaacgacgaccggc

SEQ ID NO: 18931 - DNA, 31 bp, Artificial Sequence
  Description of Artificial Sequence:  Enzymatic Nucleic Acid
agcccgggggctagctacaacgagccgaccg

SEQ ID NO: 18932 - DNA, 31 bp, Artificial Sequence
  Description of Artificial Sequence:  Enzymatic Nucleic Acid
ctagggagggctagctacaacgaccgggcgc

SEQ ID NO: 18933 - DNA, 31 bp, Artificial Sequence
  Description of Artificial Sequence:  Enzymatic Nucleic Acid
gcacagggggctagctacaacgatagggagc

SEQ ID NO: 18934 - DNA, 31 bp, Artificial Sequence
  Description of Artificial Sequence:  Enzymatic Nucleic Acid
tgagcgcaggctagctacaacgaagggctag

SEQ ID NO: 18935 - DNA, 31 bp, Artificial Sequence
  Description of Artificial Sequence:  Enzymatic Nucleic Acid
gttgagcgggctagctacaacgaacagggct

SEQ ID NO: 18936 - DNA, 31 bp, Artificial Sequence
  Description of Artificial Sequence:  Enzymatic Nucleic Acid
cagttgagggctagctacaacgagcacaggg

SEQ ID NO: 18937 - DNA, 31 bp, Artificial Sequence
  Description of Artificial Sequence:  Enzymatic Nucleic Acid
caggacagggctagctacaacgatgagcgca

SEQ ID NO: 18938 - DNA, 31 bp, Artificial Sequence
  Description of Artificial Sequence:  Enzymatic Nucleic Acid
gcgcaggaggctagctacaacgaagttgagc

SEQ ID NO: 18939 - DNA, 31 bp, Artificial Sequence
  Description of Artificial Sequence:  Enzymatic Nucleic Acid
ccgcagcgggctagctacaacgaaggacagt

SEQ ID NO: 18940 - DNA, 31 bp, Artificial Sequence
  Description of Artificial Sequence:  Enzymatic Nucleic Acid
ccccgcagggctagctacaacgagcaggaca

SEQ ID NO: 18941 - DNA, 31 bp, Artificial Sequence
  Description of Artificial Sequence:  Enzymatic Nucleic Acid
gcaccccgggctagctacaacgaagcgcagg

SEQ ID NO: 18942 - DNA, 31 bp, Artificial Sequence
  Description of Artificial Sequence:  Enzymatic Nucleic Acid
tcgcggcaggctagctacaacgacccgcagc

SEQ ID NO: 18943 - DNA, 31 bp, Artificial Sequence
  Description of Artificial Sequence:  Enzymatic Nucleic Acid
actcgcggggctagctacaacgaaccccgca

SEQ ID NO: 18944 - DNA, 31 bp, Artificial Sequence
  Description of Artificial Sequence:  Enzymatic Nucleic Acid
ggaactcgggctagctacaacgaggcacccc

SEQ ID NO: 18945 - DNA, 31 bp, Artificial Sequence
  Description of Artificial Sequence:  Enzymatic Nucleic Acid
aggtggaaggctagctacaacgatcgcggca

SEQ ID NO: 18946 - DNA, 31 bp, Artificial Sequence
  Description of Artificial Sequence:  Enzymatic Nucleic Acid
cgcggaggggctagctacaacgaggaactcg

SEQ ID NO: 18947 - DNA, 31 bp, Artificial Sequence
  Description of Artificial Sequence:  Enzymatic Nucleic Acid
aggaggcgggctagctacaacgaggaggtgg

SEQ ID NO: 18948 - DNA, 31 bp, Artificial Sequence
  Description of Artificial Sequence:  Enzymatic Nucleic Acid
gaaggaggggctagctacaacgagcggaggt

SEQ ID NO: 18949 - DNA, 31 bp, Artificial Sequence
  Description of Artificial Sequence:  Enzymatic Nucleic Acid
agcgcctgggctagctacaacgactagagaa

SEQ ID NO: 18950 - DNA, 31 bp, Artificial Sequence
  Description of Artificial Sequence:  Enzymatic Nucleic Acid
tcccagcgggctagctacaacgactgtctag

SEQ ID NO: 18951 - DNA, 31 bp, Artificial Sequence
  Description of Artificial Sequence:  Enzymatic Nucleic Acid
tctcccagggctagctacaacgagcctgtct

SEQ ID NO: 18952 - DNA, 31 bp, Artificial Sequence
  Description of Artificial Sequence:  Enzymatic Nucleic Acid
ggagccggggctagctacaacgatctttctc

SEQ ID NO: 18953 - DNA, 31 bp, Artificial Sequence
  Description of Artificial Sequence:  Enzymatic Nucleic Acid
ctcgggagggctagctacaacgacggttctt

SEQ ID NO: 18954 - DNA, 31 bp, Artificial Sequence
  Description of Artificial Sequence:  Enzymatic Nucleic Acid
gcccagaaggctagctacaacgatcgggagc

SEQ ID NO: 18955 - DNA, 31 bp, Artificial Sequence
  Description of Artificial Sequence:  Enzymatic Nucleic Acid
gcgaaatgggctagctacaacgaccagaact

SEQ ID NO: 18956 - DNA, 31 bp, Artificial Sequence
  Description of Artificial Sequence:  Enzymatic Nucleic Acid
gggcgaaaggctagctacaacgagcccagaa

SEQ ID NO: 18957 - DNA, 31 bp, Artificial Sequence
  Description of Artificial Sequence:  Enzymatic Nucleic Acid
gagccgggggctagctacaacgagaaatgcc

SEQ ID NO: 18958 - DNA, 31 bp, Artificial Sequence
  Description of Artificial Sequence:  Enzymatic Nucleic Acid
acctcgagggctagctacaacgacgggcgaa

SEQ ID NO: 18959 - DNA, 31 bp, Artificial Sequence
  Description of Artificial Sequence:  Enzymatic Nucleic Acid
atcctgcaggctagctacaacgactcgagcc

SEQ ID NO: 18960 - DNA, 31 bp, Artificial Sequence
  Description of Artificial Sequence:  Enzymatic Nucleic Acid
gcatcctgggctagctacaacgaacctcgag

SEQ ID NO: 18961 - DNA, 31 bp, Artificial Sequence
  Description of Artificial Sequence:  Enzymatic Nucleic Acid
gctctgcaggctagctacaacgacctgcacc

SEQ ID NO: 18962 - DNA, 31 bp, Artificial Sequence
  Description of Artificial Sequence:  Enzymatic Nucleic Acid
ttgctctgggctagctacaacgaatcctgca

SEQ ID NO: 18963 - DNA, 31 bp, Artificial Sequence
  Description of Artificial Sequence:  Enzymatic Nucleic Acid
gcaccttgggctagctacaacgatctgcatc

SEQ ID NO: 18964 - DNA, 31 bp, Artificial Sequence
  Description of Artificial Sequence:  Enzymatic Nucleic Acid
cagcagcaggctagctacaacgacttgctct

SEQ ID NO: 18965 - DNA, 31 bp, Artificial Sequence
  Description of Artificial Sequence:  Enzymatic Nucleic Acid
gccagcagggctagctacaacgaaccttgct

SEQ ID NO: 18966 - DNA, 31 bp, Artificial Sequence
  Description of Artificial Sequence:  Enzymatic Nucleic Acid
acggccagggctagctacaacgaagcacctt

SEQ ID NO: 18967 - DNA, 31 bp, Artificial Sequence
  Description of Artificial Sequence:  Enzymatic Nucleic Acid
ggcgacggggctagctacaacgacagcagca

SEQ ID NO: 18968 - DNA, 31 bp, Artificial Sequence
  Description of Artificial Sequence:  Enzymatic Nucleic Acid
cagggcgaggctagctacaacgaggccagca

SEQ ID NO: 18969 - DNA, 31 bp, Artificial Sequence
  Description of Artificial Sequence:  Enzymatic Nucleic Acid
ccacagggggctagctacaacgagacggcca

SEQ ID NO: 18970 - DNA, 31 bp, Artificial Sequence
  Description of Artificial Sequence:  Enzymatic Nucleic Acid
cagagccaggctagctacaacgaagggcgac

SEQ ID NO: 18971 - DNA, 31 bp, Artificial Sequence
  Description of Artificial Sequence:  Enzymatic Nucleic Acid
acgcagagggctagctacaacgacacagggc

SEQ ID NO: 18972 - DNA, 31 bp, Artificial Sequence
  Description of Artificial Sequence:  Enzymatic Nucleic Acid
tctccacgggctagctacaacgaagagccac

SEQ ID NO: 18973 - DNA, 31 bp, Artificial Sequence
  Description of Artificial Sequence:  Enzymatic Nucleic Acid
ggtctccaggctagctacaacgagcagagcc

SEQ ID NO: 18974 - DNA, 31 bp, Artificial Sequence
  Description of Artificial Sequence:  Enzymatic Nucleic Acid
ggcccgggggctagctacaacgactccacgc

SEQ ID NO: 18975 - DNA, 31 bp, Artificial Sequence
  Description of Artificial Sequence:  Enzymatic Nucleic Acid
agaggcggggctagctacaacgaccgggtct

SEQ ID NO: 18976 - DNA, 31 bp, Artificial Sequence
  Description of Artificial Sequence:  Enzymatic Nucleic Acid
cacagaggggctagctacaacgaggcccggg

SEQ ID NO: 18977 - DNA, 31 bp, Artificial Sequence
  Description of Artificial Sequence:  Enzymatic Nucleic Acid
caaacccaggctagctacaacgaagaggcgg

SEQ ID NO: 18978 - DNA, 31 bp, Artificial Sequence
  Description of Artificial Sequence:  Enzymatic Nucleic Acid
taggcaaaggctagctacaacgaccacagag

SEQ ID NO: 18979 - DNA, 31 bp, Artificial Sequence
  Description of Artificial Sequence:  Enzymatic Nucleic Acid
acactaggggctagctacaacgaaaacccac

SEQ ID NO: 18980 - DNA, 31 bp, Artificial Sequence
  Description of Artificial Sequence:  Enzymatic Nucleic Acid
gagaaacaggctagctacaacgataggcaaa

SEQ ID NO: 18981 - DNA, 31 bp, Artificial Sequence
  Description of Artificial Sequence:  Enzymatic Nucleic Acid
aagagaaaggctagctacaacgaactaggca

SEQ ID NO: 18982 - DNA, 31 bp, Artificial Sequence
  Description of Artificial Sequence:  Enzymatic Nucleic Acid
tgggcagaggctagctacaacgacaagagaa

SEQ ID NO: 18983 - DNA, 31 bp, Artificial Sequence
  Description of Artificial Sequence:  Enzymatic Nucleic Acid
agcctgggggctagctacaacgaagatcaag

SEQ ID NO: 18984 - DNA, 31 bp, Artificial Sequence
  Description of Artificial Sequence:  Enzymatic Nucleic Acid
atgctgagggctagctacaacgactgggcag

SEQ ID NO: 18985 - DNA, 31 bp, Artificial Sequence
  Description of Artificial Sequence:  Enzymatic Nucleic Acid
tttgtatgggctagctacaacgatgagcctg

SEQ ID NO: 18986 - DNA, 31 bp, Artificial Sequence
  Description of Artificial Sequence:  Enzymatic Nucleic Acid
tttttgtaggctagctacaacgagctgagcc

SEQ ID NO: 18987 - DNA, 31 bp, Artificial Sequence
  Description of Artificial Sequence:  Enzymatic Nucleic Acid
tctttttgggctagctacaacgaatgctgag

SEQ ID NO: 18988 - DNA, 31 bp, Artificial Sequence
  Description of Artificial Sequence:  Enzymatic Nucleic Acid
taagtatgggctagctacaacgactttttgt

SEQ ID NO: 18989 - DNA, 31 bp, Artificial Sequence
  Description of Artificial Sequence:  Enzymatic Nucleic Acid
tgtaagtaggctagctacaacgagtcttttt

SEQ ID NO: 18990 - DNA, 31 bp, Artificial Sequence
  Description of Artificial Sequence:  Enzymatic Nucleic Acid
attgtaagggctagctacaacgaatgtcttt

SEQ ID NO: 18991 - DNA, 31 bp, Artificial Sequence
  Description of Artificial Sequence:  Enzymatic Nucleic Acid
cttaattgggctagctacaacgaaagtatgt

SEQ ID NO: 18992 - DNA, 31 bp, Artificial Sequence
  Description of Artificial Sequence:  Enzymatic Nucleic Acid
agccttaaggctagctacaacgatgtaagta

SEQ ID NO: 18993 - DNA, 31 bp, Artificial Sequence
  Description of Artificial Sequence:  Enzymatic Nucleic Acid
tgtattagggctagctacaacgacttaattg

SEQ ID NO: 18994 - DNA, 31 bp, Artificial Sequence
  Description of Artificial Sequence:  Enzymatic Nucleic Acid
gagttgtaggctagctacaacgatagcctta

SEQ ID NO: 18995 - DNA, 31 bp, Artificial Sequence
  Description of Artificial Sequence:  Enzymatic Nucleic Acid
aagagttgggctagctacaacgaattagcct

SEQ ID NO: 18996 - DNA, 31 bp, Artificial Sequence
  Description of Artificial Sequence:  Enzymatic Nucleic Acid
ttgaagagggctagctacaacgatgtattag

SEQ ID NO: 18997 - DNA, 31 bp, Artificial Sequence
  Description of Artificial Sequence:  Enzymatic Nucleic Acid
gcaagtaaggctagctacaacgattgaagag

SEQ ID NO: 18998 - DNA, 31 bp, Artificial Sequence
  Description of Artificial Sequence:  Enzymatic Nucleic Acid
cctgcaagggctagctacaacgaaatttgaa

SEQ ID NO: 18999 - DNA, 31 bp, Artificial Sequence
  Description of Artificial Sequence:  Enzymatic Nucleic Acid
gtcccctgggctagctacaacgaaagtaatt

SEQ ID NO: 19000 - DNA, 31 bp, Artificial Sequence
  Description of Artificial Sequence:  Enzymatic Nucleic Acid
tccctctgggctagctacaacgacccctgca

SEQ ID NO: 19001 - DNA, 31 bp, Artificial Sequence
  Description of Artificial Sequence:  Enzymatic Nucleic Acid
agtccaagggctagctacaacgaccctctgt

SEQ ID NO: 19002 - DNA, 31 bp, Artificial Sequence
  Description of Artificial Sequence:  Enzymatic Nucleic Acid
aaagccagggctagctacaacgaccaagtcc

SEQ ID NO: 19003 - DNA, 31 bp, Artificial Sequence
  Description of Artificial Sequence:  Enzymatic Nucleic Acid
ggccaaagggctagctacaacgacagtccaa

SEQ ID NO: 19004 - DNA, 31 bp, Artificial Sequence
  Description of Artificial Sequence:  Enzymatic Nucleic Acid
ttattgggggctagctacaacgacaaagcca

SEQ ID NO: 19005 - DNA, 31 bp, Artificial Sequence
  Description of Artificial Sequence:  Enzymatic Nucleic Acid
tctgattaggctagctacaacgatgggccaa

SEQ ID NO: 19006 - DNA, 31 bp, Artificial Sequence
  Description of Artificial Sequence:  Enzymatic Nucleic Acid
cactctgaggctagctacaacgatattgggc

SEQ ID NO: 19007 - DNA, 31 bp, Artificial Sequence
  Description of Artificial Sequence:  Enzymatic Nucleic Acid
cactgccaggctagctacaacgatctgatta

SEQ ID NO: 19008 - DNA, 31 bp, Artificial Sequence
  Description of Artificial Sequence:  Enzymatic Nucleic Acid
gctcactgggctagctacaacgacactctga

SEQ ID NO: 19009 - DNA, 31 bp, Artificial Sequence
  Description of Artificial Sequence:  Enzymatic Nucleic Acid
tttgctcaggctagctacaacgatgccactc

SEQ ID NO: 19010 - DNA, 31 bp, Artificial Sequence
  Description of Artificial Sequence:  Enzymatic Nucleic Acid
accctttgggctagctacaacgatcactgcc

SEQ ID NO: 19011 - DNA, 31 bp, Artificial Sequence
  Description of Artificial Sequence:  Enzymatic Nucleic Acid
cacctccaggctagctacaacgacctttgct

SEQ ID NO: 19012 - DNA, 31 bp, Artificial Sequence
  Description of Artificial Sequence:  Enzymatic Nucleic Acid
ctcagtcaggctagctacaacgactccaccc

SEQ ID NO: 19013 - DNA, 31 bp, Artificial Sequence
  Description of Artificial Sequence:  Enzymatic Nucleic Acid
gcactcagggctagctacaacgacacctcca

SEQ ID NO: 19014 - DNA, 31 bp, Artificial Sequence
  Description of Artificial Sequence:  Enzymatic Nucleic Acid
tcgctgcaggctagctacaacgatcagtcac

SEQ ID NO: 19015 - DNA, 31 bp, Artificial Sequence
  Description of Artificial Sequence:  Enzymatic Nucleic Acid
catcgctgggctagctacaacgaactcagtc

SEQ ID NO: 19016 - DNA, 31 bp, Artificial Sequence
  Description of Artificial Sequence:  Enzymatic Nucleic Acid
ggccatcgggctagctacaacgatgcactca

SEQ ID NO: 19017 - DNA, 31 bp, Artificial Sequence
  Description of Artificial Sequence:  Enzymatic Nucleic Acid
agaggccaggctagctacaacgacgctgcac

SEQ ID NO: 19018 - DNA, 31 bp, Artificial Sequence
  Description of Artificial Sequence:  Enzymatic Nucleic Acid
agaagaggggctagctacaacgacatcgctg

SEQ ID NO: 19019 - DNA, 31 bp, Artificial Sequence
  Description of Artificial Sequence:  Enzymatic Nucleic Acid
gtgtcttaggctagctacaacgaagaagagg

SEQ ID NO: 19020 - DNA, 31 bp, Artificial Sequence
  Description of Artificial Sequence:  Enzymatic Nucleic Acid
tgtgagtgggctagctacaacgacttacaga

SEQ ID NO: 19021 - DNA, 31 bp, Artificial Sequence
  Description of Artificial Sequence:  Enzymatic Nucleic Acid
attgtgagggctagctacaacgagtcttaca

SEQ ID NO: 19022 - DNA, 31 bp, Artificial Sequence
  Description of Artificial Sequence:  Enzymatic Nucleic Acid
tggaattgggctagctacaacgagagtgtct

SEQ ID NO: 19023 - DNA, 31 bp, Artificial Sequence
  Description of Artificial Sequence:  Enzymatic Nucleic Acid
ttttggaaggctagctacaacgatgtgagtg

SEQ ID NO: 19024 - DNA, 31 bp, Artificial Sequence
  Description of Artificial Sequence:  Enzymatic Nucleic Acid
tccgatcaggctagctacaacgattttggaa

SEQ ID NO: 19025 - DNA, 31 bp, Artificial Sequence
  Description of Artificial Sequence:  Enzymatic Nucleic Acid
atttccgaggctagctacaacgacacttttg

SEQ ID NO: 19026 - DNA, 31 bp, Artificial Sequence
  Description of Artificial Sequence:  Enzymatic Nucleic Acid
cagtgtcaggctagctacaacgattccgatc

SEQ ID NO: 19027 - DNA, 31 bp, Artificial Sequence
  Description of Artificial Sequence:  Enzymatic Nucleic Acid
ctccagtgggctagctacaacgacatttccg

SEQ ID NO: 19028 - DNA, 31 bp, Artificial Sequence
  Description of Artificial Sequence:  Enzymatic Nucleic Acid
ggctccagggctagctacaacgagtcatttc

SEQ ID NO: 19029 - DNA, 31 bp, Artificial Sequence
  Description of Artificial Sequence:  Enzymatic Nucleic Acid
cttgtaggggctagctacaacgatccagtgt

SEQ ID NO: 19030 - DNA, 31 bp, Artificial Sequence
  Description of Artificial Sequence:  Enzymatic Nucleic Acid
agcacttgggctagctacaacgaaggctcca

SEQ ID NO: 19031 - DNA, 31 bp, Artificial Sequence
  Description of Artificial Sequence:  Enzymatic Nucleic Acid
tagaagcaggctagctacaacgattgtaggc

SEQ ID NO: 19032 - DNA, 31 bp, Artificial Sequence
  Description of Artificial Sequence:  Enzymatic Nucleic Acid
ggtagaagggctagctacaacgaacttgtag

SEQ ID NO: 19033 - DNA, 31 bp, Artificial Sequence
  Description of Artificial Sequence:  Enzymatic Nucleic Acid
tttcccggggctagctacaacgaagaagcac

SEQ ID NO: 19034 - DNA, 31 bp, Artificial Sequence
  Description of Artificial Sequence:  Enzymatic Nucleic Acid
caagtcagggctagctacaacgattcccggt

SEQ ID NO: 19035 - DNA, 31 bp, Artificial Sequence
  Description of Artificial Sequence:  Enzymatic Nucleic Acid
aggccaagggctagctacaacgacagtttcc

SEQ ID NO: 19036 - DNA, 31 bp, Artificial Sequence
  Description of Artificial Sequence:  Enzymatic Nucleic Acid
gaccgaggggctagctacaacgacaagtcag

SEQ ID NO: 19037 - DNA, 31 bp, Artificial Sequence
  Description of Artificial Sequence:  Enzymatic Nucleic Acid
ataaatgaggctagctacaacgacgaggcca

SEQ ID NO: 19038 - DNA, 31 bp, Artificial Sequence
  Description of Artificial Sequence:  Enzymatic Nucleic Acid
gacataaaggctagctacaacgagaccgagg

SEQ ID NO: 19039 - DNA, 31 bp, Artificial Sequence
  Description of Artificial Sequence:  Enzymatic Nucleic Acid
catagacaggctagctacaacgaaaatgacc

SEQ ID NO: 19040 - DNA, 31 bp, Artificial Sequence
  Description of Artificial Sequence:  Enzymatic Nucleic Acid
aacatagaggctagctacaacgaataaatga

SEQ ID NO: 19041 - DNA, 31 bp, Artificial Sequence
  Description of Artificial Sequence:  Enzymatic Nucleic Acid
cttgaacaggctagctacaacgaagacataa

SEQ ID NO: 19042 - DNA, 31 bp, Artificial Sequence
  Description of Artificial Sequence:  Enzymatic Nucleic Acid
atcttgaaggctagctacaacgaatagacat

SEQ ID NO: 19043 - DNA, 31 bp, Artificial Sequence
  Description of Artificial Sequence:  Enzymatic Nucleic Acid
atctgtaaggctagctacaacgacttgaaca

SEQ ID NO: 19044 - DNA, 31 bp, Artificial Sequence
  Description of Artificial Sequence:  Enzymatic Nucleic Acid
gagatctgggctagctacaacgaaatcttga

SEQ ID NO: 19045 - DNA, 31 bp, Artificial Sequence
  Description of Artificial Sequence:  Enzymatic Nucleic Acid
aatggagaggctagctacaacgactgtaatc

SEQ ID NO: 19046 - DNA, 31 bp, Artificial Sequence
  Description of Artificial Sequence:  Enzymatic Nucleic Acid
gcaataaaggctagctacaacgaggagatct

SEQ ID NO: 19047 - DNA, 31 bp, Artificial Sequence
  Description of Artificial Sequence:  Enzymatic Nucleic Acid
agaagcaaggctagctacaacgaaaatggag

SEQ ID NO: 19048 - DNA, 31 bp, Artificial Sequence
  Description of Artificial Sequence:  Enzymatic Nucleic Acid
aacagaagggctagctacaacgaaataaatg

SEQ ID NO: 19049 - DNA, 31 bp, Artificial Sequence
  Description of Artificial Sequence:  Enzymatic Nucleic Acid
gtcactaaggctagctacaacgaagaagcaa

SEQ ID NO: 19050 - DNA, 31 bp, Artificial Sequence
  Description of Artificial Sequence:  Enzymatic Nucleic Acid
gttggtcaggctagctacaacgataacagaa

SEQ ID NO: 19051 - DNA, 31 bp, Artificial Sequence
  Description of Artificial Sequence:  Enzymatic Nucleic Acid
catgttggggctagctacaacgacactaaca

SEQ ID NO: 19052 - DNA, 31 bp, Artificial Sequence
  Description of Artificial Sequence:  Enzymatic Nucleic Acid
actccatgggctagctacaacgatggtcact

SEQ ID NO: 19053 - DNA, 31 bp, Artificial Sequence
  Description of Artificial Sequence:  Enzymatic Nucleic Acid
cgactccaggctagctacaacgagttggtca

SEQ ID NO: 19054 - DNA, 31 bp, Artificial Sequence
  Description of Artificial Sequence:  Enzymatic Nucleic Acid
gtacacgaggctagctacaacgatccatgtt

SEQ ID NO: 19055 - DNA, 31 bp, Artificial Sequence
  Description of Artificial Sequence:  Enzymatic Nucleic Acid
aatgtacaggctagctacaacgagactccat

SEQ ID NO: 19056 - DNA, 31 bp, Artificial Sequence
  Description of Artificial Sequence:  Enzymatic Nucleic Acid
gtaatgtaggctagctacaacgaacgactcc

SEQ ID NO: 19057 - DNA, 31 bp, Artificial Sequence
  Description of Artificial Sequence:  Enzymatic Nucleic Acid
cagtaatgggctagctacaacgaacacgact

SEQ ID NO: 19058 - DNA, 31 bp, Artificial Sequence
  Description of Artificial Sequence:  Enzymatic Nucleic Acid
ctcagtaaggctagctacaacgagtacacga

SEQ ID NO: 19059 - DNA, 31 bp, Artificial Sequence
  Description of Artificial Sequence:  Enzymatic Nucleic Acid
gttctcagggctagctacaacgaaatgtaca

SEQ ID NO: 19060 - DNA, 31 bp, Artificial Sequence
  Description of Artificial Sequence:  Enzymatic Nucleic Acid
tgtttttgggctagctacaacgatctcagta

SEQ ID NO: 19061 - DNA, 31 bp, Artificial Sequence
  Description of Artificial Sequence:  Enzymatic Nucleic Acid
cagttttgggctagctacaacgattttgttc

SEQ ID NO: 19062 - DNA, 31 bp, Artificial Sequence
  Description of Artificial Sequence:  Enzymatic Nucleic Acid
caccacagggctagctacaacgatttgtttt

SEQ ID NO: 19063 - DNA, 31 bp, Artificial Sequence
  Description of Artificial Sequence:  Enzymatic Nucleic Acid
aatcaccaggctagctacaacgaagttttgt

SEQ ID NO: 19064 - DNA, 31 bp, Artificial Sequence
  Description of Artificial Sequence:  Enzymatic Nucleic Acid
tggaatcaggctagctacaacgacacagttt

SEQ ID NO: 19065 - DNA, 31 bp, Artificial Sequence
  Description of Artificial Sequence:  Enzymatic Nucleic Acid
acatggaaggctagctacaacgacaccacag

SEQ ID NO: 19066 - DNA, 31 bp, Artificial Sequence
  Description of Artificial Sequence:  Enzymatic Nucleic Acid
ccgagacaggctagctacaacgaggaatcac

SEQ ID NO: 19067 - DNA, 31 bp, Artificial Sequence
  Description of Artificial Sequence:  Enzymatic Nucleic Acid
acccgagaggctagctacaacgaatggaatc

SEQ ID NO: 19068 - DNA, 31 bp, Artificial Sequence
  Description of Artificial Sequence:  Enzymatic Nucleic Acid
gaaatggaggctagctacaacgaccgagaca

SEQ ID NO: 19069 - DNA, 31 bp, Artificial Sequence
  Description of Artificial Sequence:  Enzymatic Nucleic Acid
atttgaaaggctagctacaacgaggacccga

SEQ ID NO: 19070 - DNA, 31 bp, Artificial Sequence
  Description of Artificial Sequence:  Enzymatic Nucleic Acid
cgttgagaggctagctacaacgattgaaatg

SEQ ID NO: 19071 - DNA, 31 bp, Artificial Sequence
  Description of Artificial Sequence:  Enzymatic Nucleic Acid
gtgacacgggctagctacaacgatgagattt

SEQ ID NO: 19072 - DNA, 31 bp, Artificial Sequence
  Description of Artificial Sequence:  Enzymatic Nucleic Acid
aagtgacaggctagctacaacgagttgagat

SEQ ID NO: 19073 - DNA, 31 bp, Artificial Sequence
  Description of Artificial Sequence:  Enzymatic Nucleic Acid
caaagtgaggctagctacaacgaacgttgag

SEQ ID NO: 19074 - DNA, 31 bp, Artificial Sequence
  Description of Artificial Sequence:  Enzymatic Nucleic Acid
gcacaaagggctagctacaacgagacacgtt

SEQ ID NO: 19075 - DNA, 31 bp, Artificial Sequence
  Description of Artificial Sequence:  Enzymatic Nucleic Acid
atcttgcaggctagctacaacgaaaagtgac

SEQ ID NO: 19076 - DNA, 31 bp, Artificial Sequence
  Description of Artificial Sequence:  Enzymatic Nucleic Acid
gtatcttgggctagctacaacgaacaaagtg

SEQ ID NO: 19077 - DNA, 31 bp, Artificial Sequence
  Description of Artificial Sequence:  Enzymatic Nucleic Acid
tctgggtaggctagctacaacgacttgcaca

SEQ ID NO: 19078 - DNA, 31 bp, Artificial Sequence
  Description of Artificial Sequence:  Enzymatic Nucleic Acid
tttctgggggctagctacaacgaatcttgca

SEQ ID NO: 19079 - DNA, 31 bp, Artificial Sequence
  Description of Artificial Sequence:  Enzymatic Nucleic Acid
ggaacaaaggctagctacaacgactcttttc

SEQ ID NO: 19080 - DNA, 31 bp, Artificial Sequence
  Description of Artificial Sequence:  Enzymatic Nucleic Acid
atcaggaaggctagctacaacgaaaatctct

SEQ ID NO: 19081 - DNA, 31 bp, Artificial Sequence
  Description of Artificial Sequence:  Enzymatic Nucleic Acid
tgttaccaggctagctacaacgacaggaaca

SEQ ID NO: 19082 - DNA, 31 bp, Artificial Sequence
  Description of Artificial Sequence:  Enzymatic Nucleic Acid
ttctgttaggctagctacaacgacatcagga

SEQ ID NO: 19083 - DNA, 31 bp, Artificial Sequence
  Description of Artificial Sequence:  Enzymatic Nucleic Acid
aaattctgggctagctacaacgataccatca

SEQ ID NO: 19084 - DNA, 31 bp, Artificial Sequence
  Description of Artificial Sequence:  Enzymatic Nucleic Acid
ccaggaaaggctagctacaacgatctgttac

SEQ ID NO: 19085 - DNA, 31 bp, Artificial Sequence
  Description of Artificial Sequence:  Enzymatic Nucleic Acid
tcttgctgggctagctacaacgacccaggaa

SEQ ID NO: 19086 - DNA, 31 bp, Artificial Sequence
  Description of Artificial Sequence:  Enzymatic Nucleic Acid
ccttcttgggctagctacaacgatgtcccag

SEQ ID NO: 19087 - DNA, 31 bp, Artificial Sequence
  Description of Artificial Sequence:  Enzymatic Nucleic Acid
tagtaaagggctagctacaacgaccttcttg

SEQ ID NO: 19088 - DNA, 31 bp, Artificial Sequence
  Description of Artificial Sequence:  Enzymatic Nucleic Acid
gggaatagggctagctacaacgaaaagccct

SEQ ID NO: 19089 - DNA, 31 bp, Artificial Sequence
  Description of Artificial Sequence:  Enzymatic Nucleic Acid
gctgggaaggctagctacaacgaagtaaagc

SEQ ID NO: 19090 - DNA, 31 bp, Artificial Sequence
  Description of Artificial Sequence:  Enzymatic Nucleic Acid
tcatgtagggctagctacaacgatgggaata

SEQ ID NO: 19091 - DNA, 31 bp, Artificial Sequence
  Description of Artificial Sequence:  Enzymatic Nucleic Acid
tgatcatgggctagctacaacgaagctggga

SEQ ID NO: 19092 - DNA, 31 bp, Artificial Sequence
  Description of Artificial Sequence:  Enzymatic Nucleic Acid
gctgatcaggctagctacaacgagtagctgg

SEQ ID NO: 19093 - DNA, 31 bp, Artificial Sequence
  Description of Artificial Sequence:  Enzymatic Nucleic Acid
atagctgaggctagctacaacgacatgtagc

SEQ ID NO: 19094 - DNA, 31 bp, Artificial Sequence
  Description of Artificial Sequence:  Enzymatic Nucleic Acid
cagcatagggctagctacaacgatgatcatg

SEQ ID NO: 19095 - DNA, 31 bp, Artificial Sequence
  Description of Artificial Sequence:  Enzymatic Nucleic Acid
tgccagcaggctagctacaacgaagctgatc

SEQ ID NO: 19096 - DNA, 31 bp, Artificial Sequence
  Description of Artificial Sequence:  Enzymatic Nucleic Acid
catgccagggctagctacaacgaatagctga

SEQ ID NO: 19097 - DNA, 31 bp, Artificial Sequence
  Description of Artificial Sequence:  Enzymatic Nucleic Acid
agaccatgggctagctacaacgacagcatag

SEQ ID NO: 19098 - DNA, 31 bp, Artificial Sequence
  Description of Artificial Sequence:  Enzymatic Nucleic Acid
gaagaccaggctagctacaacgagccagcat

SEQ ID NO: 19099 - DNA, 31 bp, Artificial Sequence
  Description of Artificial Sequence:  Enzymatic Nucleic Acid
acagaagaggctagctacaacgacatgccag

SEQ ID NO: 19100 - DNA, 31 bp, Artificial Sequence
  Description of Artificial Sequence:  Enzymatic Nucleic Acid
ttgcttcaggctagctacaacgaagaagacc

SEQ ID NO: 19101 - DNA, 31 bp, Artificial Sequence
  Description of Artificial Sequence:  Enzymatic Nucleic Acid
aatttttgggctagctacaacgattcacaga

SEQ ID NO: 19102 - DNA, 31 bp, Artificial Sequence
  Description of Artificial Sequence:  Enzymatic Nucleic Acid
atcattaaggctagctacaacgattttgctt

SEQ ID NO: 19103 - DNA, 31 bp, Artificial Sequence
  Description of Artificial Sequence:  Enzymatic Nucleic Acid
tttcatcaggctagctacaacgataattttt

SEQ ID NO: 19104 - DNA, 31 bp, Artificial Sequence
  Description of Artificial Sequence:  Enzymatic Nucleic Acid
aactttcaggctagctacaacgacattaatt

SEQ ID NO: 19105 - DNA, 31 bp, Artificial Sequence
  Description of Artificial Sequence:  Enzymatic Nucleic Acid
actggtaaggctagctacaacgatttcatca

SEQ ID NO: 19106 - DNA, 31 bp, Artificial Sequence
  Description of Artificial Sequence:  Enzymatic Nucleic Acid
tagactggggctagctacaacgaaactttca

SEQ ID NO: 19107 - DNA, 31 bp, Artificial Sequence
  Description of Artificial Sequence:  Enzymatic Nucleic Acid
ataatagaggctagctacaacgatggtaact

SEQ ID NO: 19108 - DNA, 31 bp, Artificial Sequence
  Description of Artificial Sequence:  Enzymatic Nucleic Acid
gtacataaggctagctacaacgaagactggt

SEQ ID NO: 19109 - DNA, 31 bp, Artificial Sequence
  Description of Artificial Sequence:  Enzymatic Nucleic Acid
tatgtacaggctagctacaacgaaatagact

SEQ ID NO: 19110 - DNA, 31 bp, Artificial Sequence
  Description of Artificial Sequence:  Enzymatic Nucleic Acid
actatgtaggctagctacaacgaataataga

SEQ ID NO: 19111 - DNA, 31 bp, Artificial Sequence
  Description of Artificial Sequence:  Enzymatic Nucleic Acid
caactatgggctagctacaacgaacataata

SEQ ID NO: 19112 - DNA, 31 bp, Artificial Sequence
  Description of Artificial Sequence:  Enzymatic Nucleic Acid
gacaactaggctagctacaacgagtacataa

SEQ ID NO: 19113 - DNA, 31 bp, Artificial Sequence
  Description of Artificial Sequence:  Enzymatic Nucleic Acid
aacgacaaggctagctacaacgatatgtaca

SEQ ID NO: 19114 - DNA, 31 bp, Artificial Sequence
  Description of Artificial Sequence:  Enzymatic Nucleic Acid
tacaacgaggctagctacaacgaaactatgt

SEQ ID NO: 19115 - DNA, 31 bp, Artificial Sequence
  Description of Artificial Sequence:  Enzymatic Nucleic Acid
ccctacaaggctagctacaacgagacaacta

SEQ ID NO: 19116 - DNA, 31 bp, Artificial Sequence
  Description of Artificial Sequence:  Enzymatic Nucleic Acid
ataccctaggctagctacaacgaaacgacaa

SEQ ID NO: 19117 - DNA, 31 bp, Artificial Sequence
  Description of Artificial Sequence:  Enzymatic Nucleic Acid
atcctataggctagctacaacgacctacaac

SEQ ID NO: 19118 - DNA, 31 bp, Artificial Sequence
  Description of Artificial Sequence:  Enzymatic Nucleic Acid
aaatcctaggctagctacaacgaaccctaca

SEQ ID NO: 19119 - DNA, 31 bp, Artificial Sequence
  Description of Artificial Sequence:  Enzymatic Nucleic Acid
atcataaaggctagctacaacgacctatacc

SEQ ID NO: 19120 - DNA, 31 bp, Artificial Sequence
  Description of Artificial Sequence:  Enzymatic Nucleic Acid
ccacatcaggctagctacaacgaaaatccta

SEQ ID NO: 19121 - DNA, 31 bp, Artificial Sequence
  Description of Artificial Sequence:  Enzymatic Nucleic Acid
gaaccacaggctagctacaacgacataaatc

SEQ ID NO: 19122 - DNA, 31 bp, Artificial Sequence
  Description of Artificial Sequence:  Enzymatic Nucleic Acid
cagaaccaggctagctacaacgaatcataaa

SEQ ID NO: 19123 - DNA, 31 bp, Artificial Sequence
  Description of Artificial Sequence:  Enzymatic Nucleic Acid
actcagaaggctagctacaacgacacatcat

SEQ ID NO: 19124 - DNA, 31 bp, Artificial Sequence
  Description of Artificial Sequence:  Enzymatic Nucleic Acid
gagacggaggctagctacaacgatcagaacc

SEQ ID NO: 19125 - DNA, 31 bp, Artificial Sequence
  Description of Artificial Sequence:  Enzymatic Nucleic Acid
ccatgagaggctagctacaacgaggactcag

SEQ ID NO: 19126 - DNA, 31 bp, Artificial Sequence
  Description of Artificial Sequence:  Enzymatic Nucleic Acid
caattccaggctagctacaacgagagacgga

SEQ ID NO: 19127 - DNA, 31 bp, Artificial Sequence
  Description of Artificial Sequence:  Enzymatic Nucleic Acid
tagttcaaggctagctacaacgatccatgag

SEQ ID NO: 19128 - DNA, 31 bp, Artificial Sequence
  Description of Artificial Sequence:  Enzymatic Nucleic Acid
acagatagggctagctacaacgatcaattcc

SEQ ID NO: 19129 - DNA, 31 bp, Artificial Sequence
  Description of Artificial Sequence:  Enzymatic Nucleic Acid
ccaacagaggctagctacaacgaagttcaat

SEQ ID NO: 19130 - DNA, 31 bp, Artificial Sequence
  Description of Artificial Sequence:  Enzymatic Nucleic Acid
ttctccaaggctagctacaacgaagatagtt

SEQ ID NO: 19131 - DNA, 31 bp, Artificial Sequence
  Description of Artificial Sequence:  Enzymatic Nucleic Acid
aagacaagggctagctacaacgattttctcc

SEQ ID NO: 19132 - DNA, 31 bp, Artificial Sequence
  Description of Artificial Sequence:  Enzymatic Nucleic Acid
atttaagaggctagctacaacgaaagctttt

SEQ ID NO: 19133 - DNA, 31 bp, Artificial Sequence
  Description of Artificial Sequence:  Enzymatic Nucleic Acid
ctgtacaaggctagctacaacgattaagaca

SEQ ID NO: 19134 - DNA, 31 bp, Artificial Sequence
  Description of Artificial Sequence:  Enzymatic Nucleic Acid
ttgctgtaggctagctacaacgaaatttaag

SEQ ID NO: 19135 - DNA, 31 bp, Artificial Sequence
  Description of Artificial Sequence:  Enzymatic Nucleic Acid
tcttgctgggctagctacaacgaacaattta

SEQ ID NO: 19136 - DNA, 31 bp, Artificial Sequence
  Description of Artificial Sequence:  Enzymatic Nucleic Acid
agttcttgggctagctacaacgatgtacaat

SEQ ID NO: 19137 - DNA, 31 bp, Artificial Sequence
  Description of Artificial Sequence:  Enzymatic Nucleic Acid
tagttcagggctagctacaacgatcttgctg

SEQ ID NO: 19138 - DNA, 31 bp, Artificial Sequence
  Description of Artificial Sequence:  Enzymatic Nucleic Acid
acatttagggctagctacaacgatcagttct

SEQ ID NO: 19139 - DNA, 31 bp, Artificial Sequence
  Description of Artificial Sequence:  Enzymatic Nucleic Acid
tccccacaggctagctacaacgattagttca

SEQ ID NO: 19140 - DNA, 31 bp, Artificial Sequence
  Description of Artificial Sequence:  Enzymatic Nucleic Acid
aatccccaggctagctacaacgaatttagtt

SEQ ID NO: 19141 - DNA, 31 bp, Artificial Sequence
  Description of Artificial Sequence:  Enzymatic Nucleic Acid
gaagtcaaggctagctacaacgaccccacat

SEQ ID NO: 19142 - DNA, 31 bp, Artificial Sequence
  Description of Artificial Sequence:  Enzymatic Nucleic Acid
agttgaagggctagctacaacgacaatcccc

SEQ ID NO: 19143 - DNA, 31 bp, Artificial Sequence
  Description of Artificial Sequence:  Enzymatic Nucleic Acid
attcccagggctagctacaacgatgaagtca

SEQ ID NO: 19144 - DNA, 31 bp, Artificial Sequence
  Description of Artificial Sequence:  Enzymatic Nucleic Acid
gaagggtaggctagctacaacgatcccagtt

SEQ ID NO: 19145 - DNA, 31 bp, Artificial Sequence
  Description of Artificial Sequence:  Enzymatic Nucleic Acid
aagaagggggctagctacaacgaattcccag

SEQ ID NO: 19146 - DNA, 31 bp, Artificial Sequence
  Description of Artificial Sequence:  Enzymatic Nucleic Acid
tgctgatgggctagctacaacgattcgaaga

SEQ ID NO: 19147 - DNA, 31 bp, Artificial Sequence
  Description of Artificial Sequence:  Enzymatic Nucleic Acid
tatgctgaggctagctacaacgagcttcgaa

SEQ ID NO: 19148 - DNA, 31 bp, Artificial Sequence
  Description of Artificial Sequence:  Enzymatic Nucleic Acid
ttcttatgggctagctacaacgatgatgctt

SEQ ID NO: 19149 - DNA, 31 bp, Artificial Sequence
  Description of Artificial Sequence:  Enzymatic Nucleic Acid
gtttcttaggctagctacaacgagctgatgc

SEQ ID NO: 19150 - DNA, 31 bp, Artificial Sequence
  Description of Artificial Sequence:  Enzymatic Nucleic Acid
tttacaagggctagctacaacgattcttatg

SEQ ID NO: 19151 - DNA, 31 bp, Artificial Sequence
  Description of Artificial Sequence:  Enzymatic Nucleic Acid
tcggtttaggctagctacaacgaaagtttct

SEQ ID NO: 19152 - DNA, 31 bp, Artificial Sequence
  Description of Artificial Sequence:  Enzymatic Nucleic Acid
ggtctcggggctagctacaacgattacaagt

SEQ ID NO: 19153 - DNA, 31 bp, Artificial Sequence
  Description of Artificial Sequence:  Enzymatic Nucleic Acid
tttttaggggctagctacaacgactcggttt

SEQ ID NO: 19154 - DNA, 31 bp, Artificial Sequence
  Description of Artificial Sequence:  Enzymatic Nucleic Acid
agactgggggctagctacaacgattttaggt

SEQ ID NO: 19155 - DNA, 31 bp, Artificial Sequence
  Description of Artificial Sequence:  Enzymatic Nucleic Acid
ctcccagaggctagctacaacgatgggtttt

SEQ ID NO: 19156 - DNA, 31 bp, Artificial Sequence
  Description of Artificial Sequence:  Enzymatic Nucleic Acid
tcatctcaggctagctacaacgatcccagac

SEQ ID NO: 19157 - DNA, 31 bp, Artificial Sequence
  Description of Artificial Sequence:  Enzymatic Nucleic Acid
tttcttcaggctagctacaacgactcactcc

SEQ ID NO: 19158 - DNA, 31 bp, Artificial Sequence
  Description of Artificial Sequence:  Enzymatic Nucleic Acid
ctcaaaaaggctagctacaacgattcttcat

SEQ ID NO: 19159 - DNA, 31 bp, Artificial Sequence
  Description of Artificial Sequence:  Enzymatic Nucleic Acid
ttaaggtgggctagctacaacgatcaaaaat

SEQ ID NO: 19160 - DNA, 31 bp, Artificial Sequence
  Description of Artificial Sequence:  Enzymatic Nucleic Acid
agttaaggggctagctacaacgagctcaaaa

SEQ ID NO: 19161 - DNA, 31 bp, Artificial Sequence
  Description of Artificial Sequence:  Enzymatic Nucleic Acid
atctatagggctagctacaacgataaggtgc

SEQ ID NO: 19162 - DNA, 31 bp, Artificial Sequence
  Description of Artificial Sequence:  Enzymatic Nucleic Acid
accatctaggctagctacaacgaagttaagg

SEQ ID NO: 19163 - DNA, 31 bp, Artificial Sequence
  Description of Artificial Sequence:  Enzymatic Nucleic Acid
ttacaccaggctagctacaacgactatagtt

SEQ ID NO: 19164 - DNA, 31 bp, Artificial Sequence
  Description of Artificial Sequence:  Enzymatic Nucleic Acid
gggttacaggctagctacaacgacatctata

SEQ ID NO: 19165 - DNA, 31 bp, Artificial Sequence
  Description of Artificial Sequence:  Enzymatic Nucleic Acid
ccgggttaggctagctacaacgaaccatcta

SEQ ID NO: 19166 - DNA, 31 bp, Artificial Sequence
  Description of Artificial Sequence:  Enzymatic Nucleic Acid
actccgggggctagctacaacgatacaccat

SEQ ID NO: 19167 - DNA, 31 bp, Artificial Sequence
  Description of Artificial Sequence:  Enzymatic Nucleic Acid
cttggtcaggctagctacaacgatccgggtt

SEQ ID NO: 19168 - DNA, 31 bp, Artificial Sequence
  Description of Artificial Sequence:  Enzymatic Nucleic Acid
atccttggggctagctacaacgacactccgg

SEQ ID NO: 19169 - DNA, 31 bp, Artificial Sequence
  Description of Artificial Sequence:  Enzymatic Nucleic Acid
gtgtacaaggctagctacaacgaccttggtc

SEQ ID NO: 19170 - DNA, 31 bp, Artificial Sequence
  Description of Artificial Sequence:  Enzymatic Nucleic Acid
caggtgtaggctagctacaacgaaatccttg

SEQ ID NO: 19171 - DNA, 31 bp, Artificial Sequence
  Description of Artificial Sequence:  Enzymatic Nucleic Acid
cacaggtgggctagctacaacgaacaatcct

SEQ ID NO: 19172 - DNA, 31 bp, Artificial Sequence
  Description of Artificial Sequence:  Enzymatic Nucleic Acid
tgcacaggggctagctacaacgagtacaatc

SEQ ID NO: 19173 - DNA, 31 bp, Artificial Sequence
  Description of Artificial Sequence:  Enzymatic Nucleic Acid
atgctgcaggctagctacaacgaaggtgtac

SEQ ID NO: 19174 - DNA, 31 bp, Artificial Sequence
  Description of Artificial Sequence:  Enzymatic Nucleic Acid
ggatgctgggctagctacaacgaacaggtgt

SEQ ID NO: 19175 - DNA, 31 bp, Artificial Sequence
  Description of Artificial Sequence:  Enzymatic Nucleic Acid
actggatgggctagctacaacgatgcacagg

SEQ ID NO: 19176 - DNA, 31 bp, Artificial Sequence
  Description of Artificial Sequence:  Enzymatic Nucleic Acid
ccactggaggctagctacaacgagctgcaca

SEQ ID NO: 19177 - DNA, 31 bp, Artificial Sequence
  Description of Artificial Sequence:  Enzymatic Nucleic Acid
tcagcccaggctagctacaacgatggatgct

SEQ ID NO: 19178 - DNA, 31 bp, Artificial Sequence
  Description of Artificial Sequence:  Enzymatic Nucleic Acid
gtcatcagggctagctacaacgaccactgga

SEQ ID NO: 19179 - DNA, 31 bp, Artificial Sequence
  Description of Artificial Sequence:  Enzymatic Nucleic Acid
cttggtcaggctagctacaacgacagcccac

SEQ ID NO: 19180 - DNA, 31 bp, Artificial Sequence
  Description of Artificial Sequence:  Enzymatic Nucleic Acid
cttcttggggctagctacaacgacatcagcc

SEQ ID NO: 19181 - DNA, 31 bp, Artificial Sequence
  Description of Artificial Sequence:  Enzymatic Nucleic Acid
atgtgctgggctagctacaacgatcttcttg

SEQ ID NO: 19182 - DNA, 31 bp, Artificial Sequence
  Description of Artificial Sequence:  Enzymatic Nucleic Acid
caaatgtgggctagctacaacgatgttcttc

SEQ ID NO: 19183 - DNA, 31 bp, Artificial Sequence
  Description of Artificial Sequence:  Enzymatic Nucleic Acid
gacaaatgggctagctacaacgagctgttct

SEQ ID NO: 19184 - DNA, 31 bp, Artificial Sequence
  Description of Artificial Sequence:  Enzymatic Nucleic Acid
ctgacaaaggctagctacaacgagtgctgtt

SEQ ID NO: 19185 - DNA, 31 bp, Artificial Sequence
  Description of Artificial Sequence:  Enzymatic Nucleic Acid
gaccctgaggctagctacaacgaaaatgtgc

SEQ ID NO: 19186 - DNA, 31 bp, Artificial Sequence
  Description of Artificial Sequence:  Enzymatic Nucleic Acid
ttcatggaggctagctacaacgacctgacaa

SEQ ID NO: 19187 - DNA, 31 bp, Artificial Sequence
  Description of Artificial Sequence:  Enzymatic Nucleic Acid
gtttttcaggctagctacaacgaggaccctg

SEQ ID NO: 19188 - DNA, 31 bp, Artificial Sequence
  Description of Artificial Sequence:  Enzymatic Nucleic Acid
acaaaaggggctagctacaacgattttcatg

SEQ ID NO: 19189 - DNA, 31 bp, Artificial Sequence
  Description of Artificial Sequence:  Enzymatic Nucleic Acid
aaaagcaaggctagctacaacgaaaaaggtt

SEQ ID NO: 19190 - DNA, 31 bp, Artificial Sequence
  Description of Artificial Sequence:  Enzymatic Nucleic Acid
tccaaaagggctagctacaacgaaacaaaag

SEQ ID NO: 19191 - DNA, 31 bp, Artificial Sequence
  Description of Artificial Sequence:  Enzymatic Nucleic Acid
ccatgccaggctagctacaacgattccaaaa

SEQ ID NO: 19192 - DNA, 31 bp, Artificial Sequence
  Description of Artificial Sequence:  Enzymatic Nucleic Acid
attccatgggctagctacaacgacacttcca

SEQ ID NO: 19193 - DNA, 31 bp, Artificial Sequence
  Description of Artificial Sequence:  Enzymatic Nucleic Acid
agattccaggctagctacaacgagccacttc

SEQ ID NO: 19194 - DNA, 31 bp, Artificial Sequence
  Description of Artificial Sequence:  Enzymatic Nucleic Acid
accagagaggctagctacaacgatccatgcc

SEQ ID NO: 19195 - DNA, 31 bp, Artificial Sequence
  Description of Artificial Sequence:  Enzymatic Nucleic Acid
ggcttccaggctagctacaacgacagagatt

SEQ ID NO: 19196 - DNA, 31 bp, Artificial Sequence
  Description of Artificial Sequence:  Enzymatic Nucleic Acid
caccgtggggctagctacaacgattccacca

SEQ ID NO: 19197 - DNA, 31 bp, Artificial Sequence
  Description of Artificial Sequence:  Enzymatic Nucleic Acid
ccccaccgggctagctacaacgaggcttcca

SEQ ID NO: 19198 - DNA, 31 bp, Artificial Sequence
  Description of Artificial Sequence:  Enzymatic Nucleic Acid
ctcccccaggctagctacaacgacgtggctt

SEQ ID NO: 19199 - DNA, 31 bp, Artificial Sequence
  Description of Artificial Sequence:  Enzymatic Nucleic Acid
ctgacacgggctagctacaacgatcccccac

SEQ ID NO: 19200 - DNA, 31 bp, Artificial Sequence
  Description of Artificial Sequence:  Enzymatic Nucleic Acid
ttctgacaggctagctacaacgagctccccc

SEQ ID NO: 19201 - DNA, 31 bp, Artificial Sequence
  Description of Artificial Sequence:  Enzymatic Nucleic Acid
gattctgaggctagctacaacgaacgctccc

SEQ ID NO: 19202 - DNA, 31 bp, Artificial Sequence
  Description of Artificial Sequence:  Enzymatic Nucleic Acid
cgcagggaggctagctacaacgatctgacac

SEQ ID NO: 19203 - DNA, 31 bp, Artificial Sequence
  Description of Artificial Sequence:  Enzymatic Nucleic Acid
gtacttcgggctagctacaacgaagggattc

SEQ ID NO: 19204 - DNA, 31 bp, Artificial Sequence
  Description of Artificial Sequence:  Enzymatic Nucleic Acid
ccaaggtaggctagctacaacgattcgcagg

SEQ ID NO: 19205 - DNA, 31 bp, Artificial Sequence
  Description of Artificial Sequence:  Enzymatic Nucleic Acid
aaccaaggggctagctacaacgaacttcgca

SEQ ID NO: 19206 - DNA, 31 bp, Artificial Sequence
  Description of Artificial Sequence:  Enzymatic Nucleic Acid
gtgggtaaggctagctacaacgacaaggtac

SEQ ID NO: 19207 - DNA, 31 bp, Artificial Sequence
  Description of Artificial Sequence:  Enzymatic Nucleic Acid
ggggtgggggctagctacaacgaaaccaagg

SEQ ID NO: 19208 - DNA, 31 bp, Artificial Sequence
  Description of Artificial Sequence:  Enzymatic Nucleic Acid
tctgggggggctagctacaacgagggtaacc

SEQ ID NO: 19209 - DNA, 31 bp, Artificial Sequence
  Description of Artificial Sequence:  Enzymatic Nucleic Acid
ccattttaggctagctacaacgattctgggg

SEQ ID NO: 19210 - DNA, 31 bp, Artificial Sequence
  Description of Artificial Sequence:  Enzymatic Nucleic Acid
ttataccaggctagctacaacgatttatttc

SEQ ID NO: 19211 - DNA, 31 bp, Artificial Sequence
  Description of Artificial Sequence:  Enzymatic Nucleic Acid
tttttataggctagctacaacgacattttat

SEQ ID NO: 19212 - DNA, 31 bp, Artificial Sequence
  Description of Artificial Sequence:  Enzymatic Nucleic Acid
catttttaggctagctacaacgaaccatttt

SEQ ID NO: 19213 - DNA, 31 bp, Artificial Sequence
  Description of Artificial Sequence:  Enzymatic Nucleic Acid
gtattccaggctagctacaacgattttatac

SEQ ID NO: 19214 - DNA, 31 bp, Artificial Sequence
  Description of Artificial Sequence:  Enzymatic Nucleic Acid
aaggggtaggctagctacaacgatccatttt

SEQ ID NO: 19215 - DNA, 31 bp, Artificial Sequence
  Description of Artificial Sequence:  Enzymatic Nucleic Acid
tcaaggggggctagctacaacgaattccatt

SEQ ID NO: 19216 - DNA, 31 bp, Artificial Sequence
  Description of Artificial Sequence:  Enzymatic Nucleic Acid
tgattggaggctagctacaacgatcaagggg

SEQ ID NO: 19217 - DNA, 31 bp, Artificial Sequence
  Description of Artificial Sequence:  Enzymatic Nucleic Acid
ttgtgtgaggctagctacaacgatggactca

SEQ ID NO: 19218 - DNA, 31 bp, Artificial Sequence
  Description of Artificial Sequence:  Enzymatic Nucleic Acid
taattgtgggctagctacaacgagattggac

SEQ ID NO: 19219 - DNA, 31 bp, Artificial Sequence
  Description of Artificial Sequence:  Enzymatic Nucleic Acid
tttaattgggctagctacaacgagtgattgg

SEQ ID NO: 19220 - DNA, 31 bp, Artificial Sequence
  Description of Artificial Sequence:  Enzymatic Nucleic Acid
cgctttaaggctagctacaacgatgtgtgat

SEQ ID NO: 19221 - DNA, 31 bp, Artificial Sequence
  Description of Artificial Sequence:  Enzymatic Nucleic Acid
atgccccgggctagctacaacgatttaattg

SEQ ID NO: 19222 - DNA, 31 bp, Artificial Sequence
  Description of Artificial Sequence:  Enzymatic Nucleic Acid
agtacatgggctagctacaacgacccgcttt

SEQ ID NO: 19223 - DNA, 31 bp, Artificial Sequence
  Description of Artificial Sequence:  Enzymatic Nucleic Acid
tcagtacaggctagctacaacgagccccgct

SEQ ID NO: 19224 - DNA, 31 bp, Artificial Sequence
  Description of Artificial Sequence:  Enzymatic Nucleic Acid
cgtcagtaggctagctacaacgaatgccccg

SEQ ID NO: 19225 - DNA, 31 bp, Artificial Sequence
  Description of Artificial Sequence:  Enzymatic Nucleic Acid
atcgtcagggctagctacaacgaacatgccc

SEQ ID NO: 19226 - DNA, 31 bp, Artificial Sequence
  Description of Artificial Sequence:  Enzymatic Nucleic Acid
cataatcgggctagctacaacgacagtacat

SEQ ID NO: 19227 - DNA, 31 bp, Artificial Sequence
  Description of Artificial Sequence:  Enzymatic Nucleic Acid
ttccataaggctagctacaacgacgtcagta

SEQ ID NO: 19228 - DNA, 31 bp, Artificial Sequence
  Description of Artificial Sequence:  Enzymatic Nucleic Acid
cacttccaggctagctacaacgaaatcgtca

SEQ ID NO: 19229 - DNA, 31 bp, Artificial Sequence
  Description of Artificial Sequence:  Enzymatic Nucleic Acid
ttcactcaggctagctacaacgattccataa

SEQ ID NO: 19230 - DNA, 31 bp, Artificial Sequence
  Description of Artificial Sequence:  Enzymatic Nucleic Acid
ctctttcaggctagctacaacgatcacttcc

SEQ ID NO: 19231 - DNA, 31 bp, Artificial Sequence
  Description of Artificial Sequence:  Enzymatic Nucleic Acid
ttcctgtgggctagctacaacgactctttca

SEQ ID NO: 19232 - DNA, 31 bp, Artificial Sequence
  Description of Artificial Sequence:  Enzymatic Nucleic Acid
atttcctgggctagctacaacgagtctcttt

SEQ ID NO: 19233 - DNA, 31 bp, Artificial Sequence
  Description of Artificial Sequence:  Enzymatic Nucleic Acid
cagtgtaaggctagctacaacgattcctgtg

SEQ ID NO: 19234 - DNA, 31 bp, Artificial Sequence
  Description of Artificial Sequence:  Enzymatic Nucleic Acid
tgacagtgggctagctacaacgaaatttcct

SEQ ID NO: 19235 - DNA, 31 bp, Artificial Sequence
  Description of Artificial Sequence:  Enzymatic Nucleic Acid
gatgacagggctagctacaacgagtaatttc

SEQ ID NO: 19236 - DNA, 31 bp, Artificial Sequence
  Description of Artificial Sequence:  Enzymatic Nucleic Acid
aaggatgaggctagctacaacgaagtgtaat

SEQ ID NO: 19237 - DNA, 31 bp, Artificial Sequence
  Description of Artificial Sequence:  Enzymatic Nucleic Acid
ggtaaggaggctagctacaacgagacagtgt

SEQ ID NO: 19238 - DNA, 31 bp, Artificial Sequence
  Description of Artificial Sequence:  Enzymatic Nucleic Acid
gggattggggctagctacaacgaaaggatga

SEQ ID NO: 19239 - DNA, 31 bp, Artificial Sequence
  Description of Artificial Sequence:  Enzymatic Nucleic Acid
aaatgggaggctagctacaacgatggtaagg

SEQ ID NO: 19240 - DNA, 31 bp, Artificial Sequence
  Description of Artificial Sequence:  Enzymatic Nucleic Acid
ctttgaaaggctagctacaacgagggattgg

SEQ ID NO: 19241 - DNA, 31 bp, Artificial Sequence
  Description of Artificial Sequence:  Enzymatic Nucleic Acid
tggctctgggctagctacaacgattctcctt

SEQ ID NO: 19242 - DNA, 31 bp, Artificial Sequence
  Description of Artificial Sequence:  Enzymatic Nucleic Acid
ccacatggggctagctacaacgatctgcttc

SEQ ID NO: 19243 - DNA, 31 bp, Artificial Sequence
  Description of Artificial Sequence:  Enzymatic Nucleic Acid
agaccacaggctagctacaacgaggctctgc

SEQ ID NO: 19244 - DNA, 31 bp, Artificial Sequence
  Description of Artificial Sequence:  Enzymatic Nucleic Acid
agagaccaggctagctacaacgaatggctct

SEQ ID NO: 19245 - DNA, 31 bp, Artificial Sequence
  Description of Artificial Sequence:  Enzymatic Nucleic Acid
cagagagaggctagctacaacgacacatggc

SEQ ID NO: 19246 - DNA, 31 bp, Artificial Sequence
  Description of Artificial Sequence:  Enzymatic Nucleic Acid
atacacaaggctagctacaacgacagagaga

SEQ ID NO: 19247 - DNA, 31 bp, Artificial Sequence
  Description of Artificial Sequence:  Enzymatic Nucleic Acid
gacatacaggctagctacaacgaaaccagag

SEQ ID NO: 19248 - DNA, 31 bp, Artificial Sequence
  Description of Artificial Sequence:  Enzymatic Nucleic Acid
gggacataggctagctacaacgaacaaccag

SEQ ID NO: 19249 - DNA, 31 bp, Artificial Sequence
  Description of Artificial Sequence:  Enzymatic Nucleic Acid
gtgggacaggctagctacaacgaacacaacc

SEQ ID NO: 19250 - DNA, 31 bp, Artificial Sequence
  Description of Artificial Sequence:  Enzymatic Nucleic Acid
gggtgggaggctagctacaacgaatacacaa

SEQ ID NO: 19251 - DNA, 31 bp, Artificial Sequence
  Description of Artificial Sequence:  Enzymatic Nucleic Acid
atctggggggctagctacaacgagggacata

SEQ ID NO: 19252 - DNA, 31 bp, Artificial Sequence
  Description of Artificial Sequence:  Enzymatic Nucleic Acid
ctcaccaaggctagctacaacgactggggtg

SEQ ID NO: 19253 - DNA, 31 bp, Artificial Sequence
  Description of Artificial Sequence:  Enzymatic Nucleic Acid
atttctcaggctagctacaacgacaatctgg

SEQ ID NO: 19254 - DNA, 31 bp, Artificial Sequence
  Description of Artificial Sequence:  Enzymatic Nucleic Acid
attagagaggctagctacaacgattctcacc

SEQ ID NO: 19255 - DNA, 31 bp, Artificial Sequence
  Description of Artificial Sequence:  Enzymatic Nucleic Acid
aggagagaggctagctacaacgatagagatt

SEQ ID NO: 19256 - DNA, 31 bp, Artificial Sequence
  Description of Artificial Sequence:  Enzymatic Nucleic Acid
ggaatccaggctagctacaacgaaggagaga

SEQ ID NO: 19257 - DNA, 31 bp, Artificial Sequence
  Description of Artificial Sequence:  Enzymatic Nucleic Acid
ggtaggaaggctagctacaacgaccacagga

SEQ ID NO: 19258 - DNA, 31 bp, Artificial Sequence
  Description of Artificial Sequence:  Enzymatic Nucleic Acid
cgtactggggctagctacaacgaaggaatcc

SEQ ID NO: 19259 - DNA, 31 bp, Artificial Sequence
  Description of Artificial Sequence:  Enzymatic Nucleic Acid
gtgccgtaggctagctacaacgatggtagga

SEQ ID NO: 19260 - DNA, 31 bp, Artificial Sequence
  Description of Artificial Sequence:  Enzymatic Nucleic Acid
tggtgccgggctagctacaacgaactggtag

SEQ ID NO: 19261 - DNA, 31 bp, Artificial Sequence
  Description of Artificial Sequence:  Enzymatic Nucleic Acid
gagtggtgggctagctacaacgacgtactgg

SEQ ID NO: 19262 - DNA, 31 bp, Artificial Sequence
  Description of Artificial Sequence:  Enzymatic Nucleic Acid
ttgagtggggctagctacaacgagccgtact

SEQ ID NO: 19263 - DNA, 31 bp, Artificial Sequence
  Description of Artificial Sequence:  Enzymatic Nucleic Acid
cgtttgagggctagctacaacgaggtgccgt

SEQ ID NO: 19264 - DNA, 31 bp, Artificial Sequence
  Description of Artificial Sequence:  Enzymatic Nucleic Acid
tgtcagcgggctagctacaacgattgagtgg

SEQ ID NO: 19265 - DNA, 31 bp, Artificial Sequence
  Description of Artificial Sequence:  Enzymatic Nucleic Acid
catgtcagggctagctacaacgagtttgagt

SEQ ID NO: 19266 - DNA, 31 bp, Artificial Sequence
  Description of Artificial Sequence:  Enzymatic Nucleic Acid
cgtacatgggctagctacaacgacagcgttt

SEQ ID NO: 19267 - DNA, 31 bp, Artificial Sequence
  Description of Artificial Sequence:  Enzymatic Nucleic Acid
accgtacaggctagctacaacgagtcagcgt

SEQ ID NO: 19268 - DNA, 31 bp, Artificial Sequence
  Description of Artificial Sequence:  Enzymatic Nucleic Acid
agaccgtaggctagctacaacgaatgtcagc

SEQ ID NO: 19269 - DNA, 31 bp, Artificial Sequence
  Description of Artificial Sequence:  Enzymatic Nucleic Acid
atagaccgggctagctacaacgaacatgtca

SEQ ID NO: 19270 - DNA, 31 bp, Artificial Sequence
  Description of Artificial Sequence:  Enzymatic Nucleic Acid
ggcatagaggctagctacaacgacgtacatg

SEQ ID NO: 19271 - DNA, 31 bp, Artificial Sequence
  Description of Artificial Sequence:  Enzymatic Nucleic Acid
gaatggcaggctagctacaacgaagaccgta

SEQ ID NO: 19272 - DNA, 31 bp, Artificial Sequence
  Description of Artificial Sequence:  Enzymatic Nucleic Acid
aggaatggggctagctacaacgaatagaccg

SEQ ID NO: 19273 - DNA, 31 bp, Artificial Sequence
  Description of Artificial Sequence:  Enzymatic Nucleic Acid
gggaggaaggctagctacaacgaggcataga

SEQ ID NO: 19274 - DNA, 31 bp, Artificial Sequence
  Description of Artificial Sequence:  Enzymatic Nucleic Acid
atgtgatgggctagctacaacgagggggagg

SEQ ID NO: 19275 - DNA, 31 bp, Artificial Sequence
  Description of Artificial Sequence:  Enzymatic Nucleic Acid
ggatgtgaggctagctacaacgagcggggga

SEQ ID NO: 19276 - DNA, 31 bp, Artificial Sequence
  Description of Artificial Sequence:  Enzymatic Nucleic Acid
agtggatgggctagctacaacgagatgcggg

SEQ ID NO: 19277 - DNA, 31 bp, Artificial Sequence
  Description of Artificial Sequence:  Enzymatic Nucleic Acid
ccagtggaggctagctacaacgagtgatgcg

SEQ ID NO: 19278 - DNA, 31 bp, Artificial Sequence
  Description of Artificial Sequence:  Enzymatic Nucleic Acid
aataccagggctagctacaacgaggatgtga

SEQ ID NO: 19279 - DNA, 31 bp, Artificial Sequence
  Description of Artificial Sequence:  Enzymatic Nucleic Acid
tgccaataggctagctacaacgacagtggat

SEQ ID NO: 19280 - DNA, 31 bp, Artificial Sequence
  Description of Artificial Sequence:  Enzymatic Nucleic Acid
actgccaaggctagctacaacgaaccagtgg

SEQ ID NO: 19281 - DNA, 31 bp, Artificial Sequence
  Description of Artificial Sequence:  Enzymatic Nucleic Acid
tccaactgggctagctacaacgacaatacca

SEQ ID NO: 19282 - DNA, 31 bp, Artificial Sequence
  Description of Artificial Sequence:  Enzymatic Nucleic Acid
tcctccaaggctagctacaacgatgccaata

SEQ ID NO: 19283 - DNA, 31 bp, Artificial Sequence
  Description of Artificial Sequence:  Enzymatic Nucleic Acid
ttggcgcaggctagctacaacgatcttcctc

SEQ ID NO: 19284 - DNA, 31 bp, Artificial Sequence
  Description of Artificial Sequence:  Enzymatic Nucleic Acid
cgttggcgggctagctacaacgaactcttcc

SEQ ID NO: 19285 - DNA, 31 bp, Artificial Sequence
  Description of Artificial Sequence:  Enzymatic Nucleic Acid
ctcgttggggctagctacaacgagcactctt

SEQ ID NO: 19286 - DNA, 31 bp, Artificial Sequence
  Description of Artificial Sequence:  Enzymatic Nucleic Acid
tgggctcgggctagctacaacgatggcgcac

SEQ ID NO: 19287 - DNA, 31 bp, Artificial Sequence
  Description of Artificial Sequence:  Enzymatic Nucleic Acid
tggctgggggctagctacaacgatcgttggc

SEQ ID NO: 19288 - DNA, 31 bp, Artificial Sequence
  Description of Artificial Sequence:  Enzymatic Nucleic Acid
cagcttggggctagctacaacgatgggctcg

SEQ ID NO: 19289 - DNA, 31 bp, Artificial Sequence
  Description of Artificial Sequence:  Enzymatic Nucleic Acid
tgagacagggctagctacaacgattggctgg

SEQ ID NO: 19290 - DNA, 31 bp, Artificial Sequence
  Description of Artificial Sequence:  Enzymatic Nucleic Acid
cactgagaggctagctacaacgaagcttggc

SEQ ID NO: 19291 - DNA, 31 bp, Artificial Sequence
  Description of Artificial Sequence:  Enzymatic Nucleic Acid
gtttgtcaggctagctacaacgatgagacag

SEQ ID NO: 19292 - DNA, 31 bp, Artificial Sequence
  Description of Artificial Sequence:  Enzymatic Nucleic Acid
tgggtttgggctagctacaacgacactgaga

SEQ ID NO: 19293 - DNA, 31 bp, Artificial Sequence
  Description of Artificial Sequence:  Enzymatic Nucleic Acid
ggtatgggggctagctacaacgattgtcact

SEQ ID NO: 19294 - DNA, 31 bp, Artificial Sequence
  Description of Artificial Sequence:  Enzymatic Nucleic Acid
caagggtaggctagctacaacgagggtttgt

SEQ ID NO: 19295 - DNA, 31 bp, Artificial Sequence
  Description of Artificial Sequence:  Enzymatic Nucleic Acid
cacaagggggctagctacaacgaatgggttt

SEQ ID NO: 19296 - DNA, 31 bp, Artificial Sequence
  Description of Artificial Sequence:  Enzymatic Nucleic Acid
attcttcaggctagctacaacgaaagggtat

SEQ ID NO: 19297 - DNA, 31 bp, Artificial Sequence
  Description of Artificial Sequence:  Enzymatic Nucleic Acid
cttctccaggctagctacaacgatcttcaca

SEQ ID NO: 19298 - DNA, 31 bp, Artificial Sequence
  Description of Artificial Sequence:  Enzymatic Nucleic Acid
cctccacaggctagctacaacgattctccat

SEQ ID NO: 19299 - DNA, 31 bp, Artificial Sequence
  Description of Artificial Sequence:  Enzymatic Nucleic Acid
gtcctccaggctagctacaacgaacttctcc

SEQ ID NO: 19300 - DNA, 31 bp, Artificial Sequence
  Description of Artificial Sequence:  Enzymatic Nucleic Acid
cctggaagggctagctacaacgacctccaca

SEQ ID NO: 19301 - DNA, 31 bp, Artificial Sequence
  Description of Artificial Sequence:  Enzymatic Nucleic Acid
caattttaggctagctacaacgattcctccc

SEQ ID NO: 19302 - DNA, 31 bp, Artificial Sequence
  Description of Artificial Sequence:  Enzymatic Nucleic Acid
aacttcaaggctagctacaacgatttatttc

SEQ ID NO: 19303 - DNA, 31 bp, Artificial Sequence
  Description of Artificial Sequence:  Enzymatic Nucleic Acid
tttattaaggctagctacaacgattcaattt

SEQ ID NO: 19304 - DNA, 31 bp, Artificial Sequence
  Description of Artificial Sequence:  Enzymatic Nucleic Acid
gatttttaggctagctacaacgataacttca

SEQ ID NO: 19305 - DNA, 31 bp, Artificial Sequence
  Description of Artificial Sequence:  Enzymatic Nucleic Acid
caaattgaggctagctacaacgattttatta

SEQ ID NO: 19306 - DNA, 31 bp, Artificial Sequence
  Description of Artificial Sequence:  Enzymatic Nucleic Acid
agagcaaaggctagctacaacgatgattttt

SEQ ID NO: 19307 - DNA, 31 bp, Artificial Sequence
  Description of Artificial Sequence:  Enzymatic Nucleic Acid
aattagagggctagctacaacgaaaattgat

SEQ ID NO: 19308 - DNA, 31 bp, Artificial Sequence
  Description of Artificial Sequence:  Enzymatic Nucleic Acid
tccttcaaggctagctacaacgatagagcaa

SEQ ID NO: 19309 - DNA, 31 bp, Artificial Sequence
  Description of Artificial Sequence:  Enzymatic Nucleic Acid
cagttttgggctagctacaacgatttttcct

SEQ ID NO: 19310 - DNA, 31 bp, Artificial Sequence
  Description of Artificial Sequence:  Enzymatic Nucleic Acid
acttacagggctagctacaacgatttgtttt

SEQ ID NO: 19311 - DNA, 31 bp, Artificial Sequence
  Description of Artificial Sequence:  Enzymatic Nucleic Acid
ggtacttaggctagctacaacgaagttttgt

SEQ ID NO: 19312 - DNA, 31 bp, Artificial Sequence
  Description of Artificial Sequence:  Enzymatic Nucleic Acid
caagggtaggctagctacaacgattacagtt

SEQ ID NO: 19313 - DNA, 31 bp, Artificial Sequence
  Description of Artificial Sequence:  Enzymatic Nucleic Acid
aacaagggggctagctacaacgaacttacag

SEQ ID NO: 19314 - DNA, 31 bp, Artificial Sequence
  Description of Artificial Sequence:  Enzymatic Nucleic Acid
ttggataaggctagctacaacgaaagggtac

SEQ ID NO: 19315 - DNA, 31 bp, Artificial Sequence
  Description of Artificial Sequence:  Enzymatic Nucleic Acid
cgcttggaggctagctacaacgaaacaaggg

SEQ ID NO: 19316 - DNA, 31 bp, Artificial Sequence
  Description of Artificial Sequence:  Enzymatic Nucleic Acid
atttgccgggctagctacaacgattggataa

SEQ ID NO: 19317 - DNA, 31 bp, Artificial Sequence
  Description of Artificial Sequence:  Enzymatic Nucleic Acid
cacatttgggctagctacaacgacgcttgga

SEQ ID NO: 19318 - DNA, 31 bp, Artificial Sequence
  Description of Artificial Sequence:  Enzymatic Nucleic Acid
ctgacacaggctagctacaacgattgccgct

SEQ ID NO: 19319 - DNA, 31 bp, Artificial Sequence
  Description of Artificial Sequence:  Enzymatic Nucleic Acid
agctgacaggctagctacaacgaatttgccg

SEQ ID NO: 19320 - DNA, 31 bp, Artificial Sequence
  Description of Artificial Sequence:  Enzymatic Nucleic Acid
aaagctgaggctagctacaacgaacatttgc

SEQ ID NO: 19321 - DNA, 31 bp, Artificial Sequence
  Description of Artificial Sequence:  Enzymatic Nucleic Acid
gtacaaagggctagctacaacgatgacacat

SEQ ID NO: 19322 - DNA, 31 bp, Artificial Sequence
  Description of Artificial Sequence:  Enzymatic Nucleic Acid
catttgtaggctagctacaacgaaaagctga

SEQ ID NO: 19323 - DNA, 31 bp, Artificial Sequence
  Description of Artificial Sequence:  Enzymatic Nucleic Acid
cacatttgggctagctacaacgaacaaagct

SEQ ID NO: 19324 - DNA, 31 bp, Artificial Sequence
  Description of Artificial Sequence:  Enzymatic Nucleic Acid
gcttcacaggctagctacaacgattgtacaa

SEQ ID NO: 19325 - DNA, 31 bp, Artificial Sequence
  Description of Artificial Sequence:  Enzymatic Nucleic Acid
ccgcttcaggctagctacaacgaatttgtac

SEQ ID NO: 19326 - DNA, 31 bp, Artificial Sequence
  Description of Artificial Sequence:  Enzymatic Nucleic Acid
gttgaccgggctagctacaacgattcacatt

SEQ ID NO: 19327 - DNA, 31 bp, Artificial Sequence
  Description of Artificial Sequence:  Enzymatic Nucleic Acid
tttgttgaggctagctacaacgacgcttcac

SEQ ID NO: 19328 - DNA, 31 bp, Artificial Sequence
  Description of Artificial Sequence:  Enzymatic Nucleic Acid
cgactttgggctagctacaacgatgaccgct

SEQ ID NO: 19329 - DNA, 31 bp, Artificial Sequence
  Description of Artificial Sequence:  Enzymatic Nucleic Acid
tctcccgaggctagctacaacgatttgttga

SEQ ID NO: 19330 - DNA, 31 bp, Artificial Sequence
  Description of Artificial Sequence:  Enzymatic Nucleic Acid
ggagatcaggctagctacaacgacctctctc

SEQ ID NO: 19331 - DNA, 31 bp, Artificial Sequence
  Description of Artificial Sequence:  Enzymatic Nucleic Acid
gaaggagaggctagctacaacgacaccctct

SEQ ID NO: 19332 - DNA, 31 bp, Artificial Sequence
  Description of Artificial Sequence:  Enzymatic Nucleic Acid
tggtcacgggctagctacaacgaggaaggag

SEQ ID NO: 19333 - DNA, 31 bp, Artificial Sequence
  Description of Artificial Sequence:  Enzymatic Nucleic Acid
cctggtcaggctagctacaacgagtggaagg

SEQ ID NO: 19334 - DNA, 31 bp, Artificial Sequence
  Description of Artificial Sequence:  Enzymatic Nucleic Acid
acccctggggctagctacaacgacacgtgga

SEQ ID NO: 19335 - DNA, 31 bp, Artificial Sequence
  Description of Artificial Sequence:  Enzymatic Nucleic Acid
tttcaggaggctagctacaacgaccctggtc

SEQ ID NO: 19336 - DNA, 31 bp, Artificial Sequence
  Description of Artificial Sequence:  Enzymatic Nucleic Acid
caaagtaaggctagctacaacgattcaggac

SEQ ID NO: 19337 - DNA, 31 bp, Artificial Sequence
  Description of Artificial Sequence:  Enzymatic Nucleic Acid
ttgcaaagggctagctacaacgaaatttcag

SEQ ID NO: 19338 - DNA, 31 bp, Artificial Sequence
  Description of Artificial Sequence:  Enzymatic Nucleic Acid
tcaggttgggctagctacaacgaaaagtaat

SEQ ID NO: 19339 - DNA, 31 bp, Artificial Sequence
  Description of Artificial Sequence:  Enzymatic Nucleic Acid
atgtcaggggctagctacaacgatgcaaagt

SEQ ID NO: 19340 - DNA, 31 bp, Artificial Sequence
  Description of Artificial Sequence:  Enzymatic Nucleic Acid
gctgcatgggctagctacaacgacaggttgc

SEQ ID NO: 19341 - DNA, 31 bp, Artificial Sequence
  Description of Artificial Sequence:  Enzymatic Nucleic Acid
gggctgcaggctagctacaacgagtcaggtt

SEQ ID NO: 19342 - DNA, 31 bp, Artificial Sequence
  Description of Artificial Sequence:  Enzymatic Nucleic Acid
gtgggctgggctagctacaacgaatgtcagg

SEQ ID NO: 19343 - DNA, 31 bp, Artificial Sequence
  Description of Artificial Sequence:  Enzymatic Nucleic Acid
tcagtgggggctagctacaacgatgcatgtc

SEQ ID NO: 19344 - DNA, 31 bp, Artificial Sequence
  Description of Artificial Sequence:  Enzymatic Nucleic Acid
ctgctcagggctagctacaacgagggctgca

SEQ ID NO: 19345 - DNA, 31 bp, Artificial Sequence
  Description of Artificial Sequence:  Enzymatic Nucleic Acid
ctctcctgggctagctacaacgatcagtggg

SEQ ID NO: 19346 - DNA, 31 bp, Artificial Sequence
  Description of Artificial Sequence:  Enzymatic Nucleic Acid
aagacacgggctagctacaacgatctcctgc

SEQ ID NO: 19347 - DNA, 31 bp, Artificial Sequence
  Description of Artificial Sequence:  Enzymatic Nucleic Acid
caaagacaggctagctacaacgagctctcct

SEQ ID NO: 19348 - DNA, 31 bp, Artificial Sequence
  Description of Artificial Sequence:  Enzymatic Nucleic Acid
cacaaagaggctagctacaacgaacgctctc

SEQ ID NO: 19349 - DNA, 31 bp, Artificial Sequence
  Description of Artificial Sequence:  Enzymatic Nucleic Acid
gtgcaccaggctagctacaacgaaaagacac

SEQ ID NO: 19350 - DNA, 31 bp, Artificial Sequence
  Description of Artificial Sequence:  Enzymatic Nucleic Acid
gcagtgcaggctagctacaacgacacaaaga

SEQ ID NO: 19351 - DNA, 31 bp, Artificial Sequence
  Description of Artificial Sequence:  Enzymatic Nucleic Acid
ctgcagtgggctagctacaacgaaccacaaa

SEQ ID NO: 19352 - DNA, 31 bp, Artificial Sequence
  Description of Artificial Sequence:  Enzymatic Nucleic Acid
gtctgcagggctagctacaacgagcaccaca

SEQ ID NO: 19353 - DNA, 31 bp, Artificial Sequence
  Description of Artificial Sequence:  Enzymatic Nucleic Acid
tctgtctgggctagctacaacgaagtgcacc

SEQ ID NO: 19354 - DNA, 31 bp, Artificial Sequence
  Description of Artificial Sequence:  Enzymatic Nucleic Acid
tagatctgggctagctacaacgactgcagtg

SEQ ID NO: 19355 - DNA, 31 bp, Artificial Sequence
  Description of Artificial Sequence:  Enzymatic Nucleic Acid
aacgtagaggctagctacaacgactgtctgc

SEQ ID NO: 19356 - DNA, 31 bp, Artificial Sequence
  Description of Artificial Sequence:  Enzymatic Nucleic Acid
ctcaaacgggctagctacaacgaagatctgt

SEQ ID NO: 19357 - DNA, 31 bp, Artificial Sequence
  Description of Artificial Sequence:  Enzymatic Nucleic Acid
ttctcaaaggctagctacaacgagtagatct

SEQ ID NO: 19358 - DNA, 31 bp, Artificial Sequence
  Description of Artificial Sequence:  Enzymatic Nucleic Acid
atgtgaggggctagctacaacgatctcaaac

SEQ ID NO: 19359 - DNA, 31 bp, Artificial Sequence
  Description of Artificial Sequence:  Enzymatic Nucleic Acid
gtaccatgggctagctacaacgagaggttct

SEQ ID NO: 19360 - DNA, 31 bp, Artificial Sequence
  Description of Artificial Sequence:  Enzymatic Nucleic Acid
ttgtaccaggctagctacaacgagtgaggtt

SEQ ID NO: 19361 - DNA, 31 bp, Artificial Sequence
  Description of Artificial Sequence:  Enzymatic Nucleic Acid
agcttgtaggctagctacaacgacatgtgag

SEQ ID NO: 19362 - DNA, 31 bp, Artificial Sequence
  Description of Artificial Sequence:  Enzymatic Nucleic Acid
caagcttgggctagctacaacgaaccatgtg

SEQ ID NO: 19363 - DNA, 31 bp, Artificial Sequence
  Description of Artificial Sequence:  Enzymatic Nucleic Acid
gggccaagggctagctacaacgattgtacca

SEQ ID NO: 19364 - DNA, 31 bp, Artificial Sequence
  Description of Artificial Sequence:  Enzymatic Nucleic Acid
gctgtgggggctagctacaacgacaagcttg

SEQ ID NO: 19365 - DNA, 31 bp, Artificial Sequence
  Description of Artificial Sequence:  Enzymatic Nucleic Acid
agaggctgggctagctacaacgagggccaag

SEQ ID NO: 19366 - DNA, 31 bp, Artificial Sequence
  Description of Artificial Sequence:  Enzymatic Nucleic Acid
ggcagaggggctagctacaacgatgtgggcc

SEQ ID NO: 19367 - DNA, 31 bp, Artificial Sequence
  Description of Artificial Sequence:  Enzymatic Nucleic Acid
tggattggggctagctacaacgaagaggctg

SEQ ID NO: 19368 - DNA, 31 bp, Artificial Sequence
  Description of Artificial Sequence:  Enzymatic Nucleic Acid
cacatggaggctagctacaacgatggcagag

SEQ ID NO: 19369 - DNA, 31 bp, Artificial Sequence
  Description of Artificial Sequence:  Enzymatic Nucleic Acid
ctcccacaggctagctacaacgaggattggc

SEQ ID NO: 19370 - DNA, 31 bp, Artificial Sequence
  Description of Artificial Sequence:  Enzymatic Nucleic Acid
ctctcccaggctagctacaacgaatggattg

SEQ ID NO: 19371 - DNA, 31 bp, Artificial Sequence
  Description of Artificial Sequence:  Enzymatic Nucleic Acid
gtgggcaaggctagctacaacgatctcccac

SEQ ID NO: 19372 - DNA, 31 bp, Artificial Sequence
  Description of Artificial Sequence:  Enzymatic Nucleic Acid
ggtgtgggggctagctacaacgaaactctcc

SEQ ID NO: 19373 - DNA, 31 bp, Artificial Sequence
  Description of Artificial Sequence:  Enzymatic Nucleic Acid
aacaggtgggctagctacaacgagggcaact

SEQ ID NO: 19374 - DNA, 31 bp, Artificial Sequence
  Description of Artificial Sequence:  Enzymatic Nucleic Acid
caaacaggggctagctacaacgagtgggcaa

SEQ ID NO: 19375 - DNA, 31 bp, Artificial Sequence
  Description of Artificial Sequence:  Enzymatic Nucleic Acid
cttgcaaaggctagctacaacgaaggtgtgg

SEQ ID NO: 19376 - DNA, 31 bp, Artificial Sequence
  Description of Artificial Sequence:  Enzymatic Nucleic Acid
agttcttgggctagctacaacgaaaacaggt

SEQ ID NO: 19377 - DNA, 31 bp, Artificial Sequence
  Description of Artificial Sequence:  Enzymatic Nucleic Acid
tatccaagggctagctacaacgatcttgcaa

SEQ ID NO: 19378 - DNA, 31 bp, Artificial Sequence
  Description of Artificial Sequence:  Enzymatic Nucleic Acid
aaagagtaggctagctacaacgaccaagttc

SEQ ID NO: 19379 - DNA, 31 bp, Artificial Sequence
  Description of Artificial Sequence:  Enzymatic Nucleic Acid
ccaaagagggctagctacaacgaatccaagt

SEQ ID NO: 19380 - DNA, 31 bp, Artificial Sequence
  Description of Artificial Sequence:  Enzymatic Nucleic Acid
gcattcaaggctagctacaacgattccaaag

SEQ ID NO: 19381 - DNA, 31 bp, Artificial Sequence
  Description of Artificial Sequence:  Enzymatic Nucleic Acid
tggtggcaggctagctacaacgatcaatttc

SEQ ID NO: 19382 - DNA, 31 bp, Artificial Sequence
  Description of Artificial Sequence:  Enzymatic Nucleic Acid
catggtggggctagctacaacgaattcaatt

SEQ ID NO: 19383 - DNA, 31 bp, Artificial Sequence
  Description of Artificial Sequence:  Enzymatic Nucleic Acid
gaacatggggctagctacaacgaggcattca

SEQ ID NO: 19384 - DNA, 31 bp, Artificial Sequence
  Description of Artificial Sequence:  Enzymatic Nucleic Acid
agagaacaggctagctacaacgaggtggcat

SEQ ID NO: 19385 - DNA, 31 bp, Artificial Sequence
  Description of Artificial Sequence:  Enzymatic Nucleic Acid
ttagagaaggctagctacaacgaatggtggc

SEQ ID NO: 19386 - DNA, 31 bp, Artificial Sequence
  Description of Artificial Sequence:  Enzymatic Nucleic Acid
ttgtgctaggctagctacaacgatagagaac

SEQ ID NO: 19387 - DNA, 31 bp, Artificial Sequence
  Description of Artificial Sequence:  Enzymatic Nucleic Acid
catttgtgggctagctacaacgatattagag

SEQ ID NO: 19388 - DNA, 31 bp, Artificial Sequence
  Description of Artificial Sequence:  Enzymatic Nucleic Acid
gtcatttgggctagctacaacgagctattag

SEQ ID NO: 19389 - DNA, 31 bp, Artificial Sequence
  Description of Artificial Sequence:  Enzymatic Nucleic Acid
aaatgtcaggctagctacaacgattgtgcta

SEQ ID NO: 19390 - DNA, 31 bp, Artificial Sequence
  Description of Artificial Sequence:  Enzymatic Nucleic Acid
tcaaaatgggctagctacaacgacatttgtg

SEQ ID NO: 19391 - DNA, 31 bp, Artificial Sequence
  Description of Artificial Sequence:  Enzymatic Nucleic Acid
gatcaaaaggctagctacaacgagtcatttg

SEQ ID NO: 19392 - DNA, 31 bp, Artificial Sequence
  Description of Artificial Sequence:  Enzymatic Nucleic Acid
ctccatgaggctagctacaacgacaaaatgt

SEQ ID NO: 19393 - DNA, 31 bp, Artificial Sequence
  Description of Artificial Sequence:  Enzymatic Nucleic Acid
aagctccaggctagctacaacgagatcaaaa

SEQ ID NO: 19394 - DNA, 31 bp, Artificial Sequence
  Description of Artificial Sequence:  Enzymatic Nucleic Acid
ttcttaagggctagctacaacgatccatgat

SEQ ID NO: 19395 - DNA, 31 bp, Artificial Sequence
  Description of Artificial Sequence:  Enzymatic Nucleic Acid
aggatgcaggctagctacaacgatcttaagc

SEQ ID NO: 19396 - DNA, 31 bp, Artificial Sequence
  Description of Artificial Sequence:  Enzymatic Nucleic Acid
caaggatgggctagctacaacgaattcttaa

SEQ ID NO: 19397 - DNA, 31 bp, Artificial Sequence
  Description of Artificial Sequence:  Enzymatic Nucleic Acid
tgcaaggaggctagctacaacgagcattctt

SEQ ID NO: 19398 - DNA, 31 bp, Artificial Sequence
  Description of Artificial Sequence:  Enzymatic Nucleic Acid
tggtcctgggctagctacaacgaaaggatgc

SEQ ID NO: 19399 - DNA, 31 bp, Artificial Sequence
  Description of Artificial Sequence:  Enzymatic Nucleic Acid
ctccttggggctagctacaacgacctgcaag

SEQ ID NO: 19400 - DNA, 31 bp, Artificial Sequence
  Description of Artificial Sequence:  Enzymatic Nucleic Acid
agacatagggctagctacaacgactccttgg

SEQ ID NO: 19401 - DNA, 31 bp, Artificial Sequence
  Description of Artificial Sequence:  Enzymatic Nucleic Acid
ggcagacaggctagctacaacgaagtctcct

SEQ ID NO: 19402 - DNA, 31 bp, Artificial Sequence
  Description of Artificial Sequence:  Enzymatic Nucleic Acid
aaggcagaggctagctacaacgaatagtctc

SEQ ID NO: 19403 - DNA, 31 bp, Artificial Sequence
  Description of Artificial Sequence:  Enzymatic Nucleic Acid
gagcaaggggctagctacaacgaagacatag

SEQ ID NO: 19404 - DNA, 31 bp, Artificial Sequence
  Description of Artificial Sequence:  Enzymatic Nucleic Acid
gtcttgagggctagctacaacgaaaggcaga

SEQ ID NO: 19405 - DNA, 31 bp, Artificial Sequence
  Description of Artificial Sequence:  Enzymatic Nucleic Acid
tcttcctgggctagctacaacgacttgagca

SEQ ID NO: 19406 - DNA, 31 bp, Artificial Sequence
  Description of Artificial Sequence:  Enzymatic Nucleic Acid
tttcttggggctagctacaacgacttcctgt

SEQ ID NO: 19407 - DNA, 31 bp, Artificial Sequence
  Description of Artificial Sequence:  Enzymatic Nucleic Acid
acgcaatgggctagctacaacgacttttctt

SEQ ID NO: 19408 - DNA, 31 bp, Artificial Sequence
  Description of Artificial Sequence:  Enzymatic Nucleic Acid
ccacgcaaggctagctacaacgagtcttttc

SEQ ID NO: 19409 - DNA, 31 bp, Artificial Sequence
  Description of Artificial Sequence:  Enzymatic Nucleic Acid
tgaccacgggctagctacaacgaaatgtctt

SEQ ID NO: 19410 - DNA, 31 bp, Artificial Sequence
  Description of Artificial Sequence:  Enzymatic Nucleic Acid
cctgaccaggctagctacaacgagcaatgtc

SEQ ID NO: 19411 - DNA, 31 bp, Artificial Sequence
  Description of Artificial Sequence:  Enzymatic Nucleic Acid
ctgcctgaggctagctacaacgacacgcaat

SEQ ID NO: 19412 - DNA, 31 bp, Artificial Sequence
  Description of Artificial Sequence:  Enzymatic Nucleic Acid
gtgagctgggctagctacaacgactgaccac

SEQ ID NO: 19413 - DNA, 31 bp, Artificial Sequence
  Description of Artificial Sequence:  Enzymatic Nucleic Acid
actgtgagggctagctacaacgatgcctgac

SEQ ID NO: 19414 - DNA, 31 bp, Artificial Sequence
  Description of Artificial Sequence:  Enzymatic Nucleic Acid
taggactgggctagctacaacgagagctgcc

SEQ ID NO: 19415 - DNA, 31 bp, Artificial Sequence
  Description of Artificial Sequence:  Enzymatic Nucleic Acid
ctctaggaggctagctacaacgatgtgagct

SEQ ID NO: 19416 - DNA, 31 bp, Artificial Sequence
  Description of Artificial Sequence:  Enzymatic Nucleic Acid
gccacacgggctagctacaacgatctaggac

SEQ ID NO: 19417 - DNA, 31 bp, Artificial Sequence
  Description of Artificial Sequence:  Enzymatic Nucleic Acid
gtgccacaggctagctacaacgagctctagg

SEQ ID NO: 19418 - DNA, 31 bp, Artificial Sequence
  Description of Artificial Sequence:  Enzymatic Nucleic Acid
gggtgccaggctagctacaacgaacgctcta

SEQ ID NO: 19419 - DNA, 31 bp, Artificial Sequence
  Description of Artificial Sequence:  Enzymatic Nucleic Acid
cgtgggtgggctagctacaacgacacacgct

SEQ ID NO: 19420 - DNA, 31 bp, Artificial Sequence
  Description of Artificial Sequence:  Enzymatic Nucleic Acid
atcgtgggggctagctacaacgagccacacg

SEQ ID NO: 19421 - DNA, 31 bp, Artificial Sequence
  Description of Artificial Sequence:  Enzymatic Nucleic Acid
tgtgatcgggctagctacaacgagggtgcca

SEQ ID NO: 19422 - DNA, 31 bp, Artificial Sequence
  Description of Artificial Sequence:  Enzymatic Nucleic Acid
tcctgtgaggctagctacaacgacgtgggtg

SEQ ID NO: 19423 - DNA, 31 bp, Artificial Sequence
  Description of Artificial Sequence:  Enzymatic Nucleic Acid
gtttcctgggctagctacaacgagatcgtgg

SEQ ID NO: 19424 - DNA, 31 bp, Artificial Sequence
  Description of Artificial Sequence:  Enzymatic Nucleic Acid
tctccaggggctagctacaacgattcctgtg

SEQ ID NO: 19425 - DNA, 31 bp, Artificial Sequence
  Description of Artificial Sequence:  Enzymatic Nucleic Acid
tcgtctgaggctagctacaacgatctccagg

SEQ ID NO: 19426 - DNA, 31 bp, Artificial Sequence
  Description of Artificial Sequence:  Enzymatic Nucleic Acid
acttgtcgggctagctacaacgactgattct

SEQ ID NO: 19427 - DNA, 31 bp, Artificial Sequence
  Description of Artificial Sequence:  Enzymatic Nucleic Acid
aatacttgggctagctacaacgacgtctgat

SEQ ID NO: 19428 - DNA, 31 bp, Artificial Sequence
  Description of Artificial Sequence:  Enzymatic Nucleic Acid
ccccaataggctagctacaacgattgtcgtc

SEQ ID NO: 19429 - DNA, 31 bp, Artificial Sequence
  Description of Artificial Sequence:  Enzymatic Nucleic Acid
ttccccaaggctagctacaacgaacttgtcg

SEQ ID NO: 19430 - DNA, 31 bp, Artificial Sequence
  Description of Artificial Sequence:  Enzymatic Nucleic Acid
cttcgatgggctagctacaacgatttcccca

SEQ ID NO: 19431 - DNA, 31 bp, Artificial Sequence
  Description of Artificial Sequence:  Enzymatic Nucleic Acid
gacttcgaggctagctacaacgagctttccc

SEQ ID NO: 19432 - DNA, 31 bp, Artificial Sequence
  Description of Artificial Sequence:  Enzymatic Nucleic Acid
gcatgagaggctagctacaacgattcgatgc

SEQ ID NO: 19433 - DNA, 31 bp, Artificial Sequence
  Description of Artificial Sequence:  Enzymatic Nucleic Acid
gccgtgcaggctagctacaacgagagacttc

SEQ ID NO: 19434 - DNA, 31 bp, Artificial Sequence
  Description of Artificial Sequence:  Enzymatic Nucleic Acid
atgccgtgggctagctacaacgaatgagact

SEQ ID NO: 19435 - DNA, 31 bp, Artificial Sequence
  Description of Artificial Sequence:  Enzymatic Nucleic Acid
agatgccgggctagctacaacgagcatgaga

SEQ ID NO: 19436 - DNA, 31 bp, Artificial Sequence
  Description of Artificial Sequence:  Enzymatic Nucleic Acid
cccagatgggctagctacaacgacgtgcatg

SEQ ID NO: 19437 - DNA, 31 bp, Artificial Sequence
  Description of Artificial Sequence:  Enzymatic Nucleic Acid
ttcccagaggctagctacaacgagccgtgca

SEQ ID NO: 19438 - DNA, 31 bp, Artificial Sequence
  Description of Artificial Sequence:  Enzymatic Nucleic Acid
gagggggaggctagctacaacgatcccagat

SEQ ID NO: 19439 - DNA, 31 bp, Artificial Sequence
  Description of Artificial Sequence:  Enzymatic Nucleic Acid
atgatctgggctagctacaacgaggaggggg

SEQ ID NO: 19440 - DNA, 31 bp, Artificial Sequence
  Description of Artificial Sequence:  Enzymatic Nucleic Acid
ccacatgaggctagctacaacgactgtggag

SEQ ID NO: 19441 - DNA, 31 bp, Artificial Sequence
  Description of Artificial Sequence:  Enzymatic Nucleic Acid
aaaccacaggctagctacaacgagatctgtg

SEQ ID NO: 19442 - DNA, 31 bp, Artificial Sequence
  Description of Artificial Sequence:  Enzymatic Nucleic Acid
ttaaaccaggctagctacaacgaatgatctg

SEQ ID NO: 19443 - DNA, 31 bp, Artificial Sequence
  Description of Artificial Sequence:  Enzymatic Nucleic Acid
tctttaaaggctagctacaacgacacatgat

SEQ ID NO: 19444 - DNA, 31 bp, Artificial Sequence
  Description of Artificial Sequence:  Enzymatic Nucleic Acid
tctcattaggctagctacaacgactttaaac

SEQ ID NO: 19445 - DNA, 31 bp, Artificial Sequence
  Description of Artificial Sequence:  Enzymatic Nucleic Acid
gggtctcaggctagctacaacgatatcttta

SEQ ID NO: 19446 - DNA, 31 bp, Artificial Sequence
  Description of Artificial Sequence:  Enzymatic Nucleic Acid
tacaagggggctagctacaacgactcattat

SEQ ID NO: 19447 - DNA, 31 bp, Artificial Sequence
  Description of Artificial Sequence:  Enzymatic Nucleic Acid
gtcttctaggctagctacaacgaaagggtct

SEQ ID NO: 19448 - DNA, 31 bp, Artificial Sequence
  Description of Artificial Sequence:  Enzymatic Nucleic Acid
tgcctgagggctagctacaacgacttctaca

SEQ ID NO: 19449 - DNA, 31 bp, Artificial Sequence
  Description of Artificial Sequence:  Enzymatic Nucleic Acid
atacaatgggctagctacaacgactgagtct

SEQ ID NO: 19450 - DNA, 31 bp, Artificial Sequence
  Description of Artificial Sequence:  Enzymatic Nucleic Acid
caatacaaggctagctacaacgagcctgagt

SEQ ID NO: 19451 - DNA, 31 bp, Artificial Sequence
  Description of Artificial Sequence:  Enzymatic Nucleic Acid
cttcaataggctagctacaacgaaatgcctg

SEQ ID NO: 19452 - DNA, 31 bp, Artificial Sequence
  Description of Artificial Sequence:  Enzymatic Nucleic Acid
tccttcaaggctagctacaacgaacaatgcc

SEQ ID NO: 19453 - DNA, 31 bp, Artificial Sequence
  Description of Artificial Sequence:  Enzymatic Nucleic Acid
ggttcccaggctagctacaacgaccttcaat

SEQ ID NO: 19454 - DNA, 31 bp, Artificial Sequence
  Description of Artificial Sequence:  Enzymatic Nucleic Acid
ggttccggggctagctacaacgatcccatcc

SEQ ID NO: 19455 - DNA, 31 bp, Artificial Sequence
  Description of Artificial Sequence:  Enzymatic Nucleic Acid
tagtgaggggctagctacaacgatccggttc

SEQ ID NO: 19456 - DNA, 31 bp, Artificial Sequence
  Description of Artificial Sequence:  Enzymatic Nucleic Acid
gcggatagggctagctacaacgagaggttcc

SEQ ID NO: 19457 - DNA, 31 bp, Artificial Sequence
  Description of Artificial Sequence:  Enzymatic Nucleic Acid
tctgcggaggctagctacaacgaagtgaggt

SEQ ID NO: 19458 - DNA, 31 bp, Artificial Sequence
  Description of Artificial Sequence:  Enzymatic Nucleic Acid
tcactctgggctagctacaacgaggatagtg

SEQ ID NO: 19459 - DNA, 31 bp, Artificial Sequence
  Description of Artificial Sequence:  Enzymatic Nucleic Acid
cttcctcaggctagctacaacgatctgcgga

SEQ ID NO: 19460 - DNA, 31 bp, Artificial Sequence
  Description of Artificial Sequence:  Enzymatic Nucleic Acid
ggccttcgggctagctacaacgacctccttc

SEQ ID NO: 19461 - DNA, 31 bp, Artificial Sequence
  Description of Artificial Sequence:  Enzymatic Nucleic Acid
tgtagaggggctagctacaacgacttcgtcc

SEQ ID NO: 19462 - DNA, 31 bp, Artificial Sequence
  Description of Artificial Sequence:  Enzymatic Nucleic Acid
ggcaggtgggctagctacaacgaagaggcct

SEQ ID NO: 19463 - DNA, 31 bp, Artificial Sequence
  Description of Artificial Sequence:  Enzymatic Nucleic Acid
ctggcaggggctagctacaacgagtagaggc

SEQ ID NO: 19464 - DNA, 31 bp, Artificial Sequence
  Description of Artificial Sequence:  Enzymatic Nucleic Acid
atgcctggggctagctacaacgaaggtgtag

SEQ ID NO: 19465 - DNA, 31 bp, Artificial Sequence
  Description of Artificial Sequence:  Enzymatic Nucleic Acid
actgcatgggctagctacaacgactggcagg

SEQ ID NO: 19466 - DNA, 31 bp, Artificial Sequence
  Description of Artificial Sequence:  Enzymatic Nucleic Acid
acactgcaggctagctacaacgagcctggca

SEQ ID NO: 19467 - DNA, 31 bp, Artificial Sequence
  Description of Artificial Sequence:  Enzymatic Nucleic Acid
gaacactgggctagctacaacgaatgcctgg

SEQ ID NO: 19468 - DNA, 31 bp, Artificial Sequence
  Description of Artificial Sequence:  Enzymatic Nucleic Acid
caagaacaggctagctacaacgatgcatgcc

SEQ ID NO: 19469 - DNA, 31 bp, Artificial Sequence
  Description of Artificial Sequence:  Enzymatic Nucleic Acid
gccaagaaggctagctacaacgaactgcatg

SEQ ID NO: 19470 - DNA, 31 bp, Artificial Sequence
  Description of Artificial Sequence:  Enzymatic Nucleic Acid
ttgcacagggctagctacaacgacaagaaca

SEQ ID NO: 19471 - DNA, 31 bp, Artificial Sequence
  Description of Artificial Sequence:  Enzymatic Nucleic Acid
cttttgcaggctagctacaacgaagccaaga

SEQ ID NO: 19472 - DNA, 31 bp, Artificial Sequence
  Description of Artificial Sequence:  Enzymatic Nucleic Acid
cacttttgggctagctacaacgaacagccaa

SEQ ID NO: 19473 - DNA, 31 bp, Artificial Sequence
  Description of Artificial Sequence:  Enzymatic Nucleic Acid
tgcctccaggctagctacaacgattttgcac

SEQ ID NO: 19474 - DNA, 31 bp, Artificial Sequence
  Description of Artificial Sequence:  Enzymatic Nucleic Acid
gaaaaatgggctagctacaacgactccactt

SEQ ID NO: 19475 - DNA, 31 bp, Artificial Sequence
  Description of Artificial Sequence:  Enzymatic Nucleic Acid
atgaaaaaggctagctacaacgagcctccac

SEQ ID NO: 19476 - DNA, 31 bp, Artificial Sequence
  Description of Artificial Sequence:  Enzymatic Nucleic Acid
ttctattaggctagctacaacgagaaaaatg

SEQ ID NO: 19477 - DNA, 31 bp, Artificial Sequence
  Description of Artificial Sequence:  Enzymatic Nucleic Acid
accttctaggctagctacaacgatatgaaaa

SEQ ID NO: 19478 - DNA, 31 bp, Artificial Sequence
  Description of Artificial Sequence:  Enzymatic Nucleic Acid
cctgggcaggctagctacaacgacttctatt

SEQ ID NO: 19479 - DNA, 31 bp, Artificial Sequence
  Description of Artificial Sequence:  Enzymatic Nucleic Acid
ttcctgggggctagctacaacgaaccttcta

SEQ ID NO: 19480 - DNA, 31 bp, Artificial Sequence
  Description of Artificial Sequence:  Enzymatic Nucleic Acid
caagttcgggctagctacaacgacttttcct

SEQ ID NO: 19481 - DNA, 31 bp, Artificial Sequence
  Description of Artificial Sequence:  Enzymatic Nucleic Acid
tttccaagggctagctacaacgatcgtcttt

SEQ ID NO: 19482 - DNA, 31 bp, Artificial Sequence
  Description of Artificial Sequence:  Enzymatic Nucleic Acid
aataatgaggctagctacaacgattccaagt

SEQ ID NO: 19483 - DNA, 31 bp, Artificial Sequence
  Description of Artificial Sequence:  Enzymatic Nucleic Acid
tagaataaggctagctacaacgagatttcca

SEQ ID NO: 19484 - DNA, 31 bp, Artificial Sequence
  Description of Artificial Sequence:  Enzymatic Nucleic Acid
tactagaaggctagctacaacgaaatgattt

SEQ ID NO: 19485 - DNA, 31 bp, Artificial Sequence
  Description of Artificial Sequence:  Enzymatic Nucleic Acid
cgtgcctaggctagctacaacgatagaataa

SEQ ID NO: 19486 - DNA, 31 bp, Artificial Sequence
  Description of Artificial Sequence:  Enzymatic Nucleic Acid
ccgccgtgggctagctacaacgactactaga

SEQ ID NO: 19487 - DNA, 31 bp, Artificial Sequence
  Description of Artificial Sequence:  Enzymatic Nucleic Acid
caccgccgggctagctacaacgagcctacta

SEQ ID NO: 19488 - DNA, 31 bp, Artificial Sequence
  Description of Artificial Sequence:  Enzymatic Nucleic Acid
aatcaccgggctagctacaacgacgtgccta

SEQ ID NO: 19489 - DNA, 31 bp, Artificial Sequence
  Description of Artificial Sequence:  Enzymatic Nucleic Acid
ggcaatcaggctagctacaacgacgccgtgc

SEQ ID NO: 19490 - DNA, 31 bp, Artificial Sequence
  Description of Artificial Sequence:  Enzymatic Nucleic Acid
catggcaaggctagctacaacgacaccgccg

SEQ ID NO: 19491 - DNA, 31 bp, Artificial Sequence
  Description of Artificial Sequence:  Enzymatic Nucleic Acid
gaacatggggctagctacaacgaaatcaccg

SEQ ID NO: 19492 - DNA, 31 bp, Artificial Sequence
  Description of Artificial Sequence:  Enzymatic Nucleic Acid
gaagaacaggctagctacaacgaggcaatca

SEQ ID NO: 19493 - DNA, 31 bp, Artificial Sequence
  Description of Artificial Sequence:  Enzymatic Nucleic Acid
cagaagaaggctagctacaacgaatggcaat

SEQ ID NO: 19494 - DNA, 31 bp, Artificial Sequence
  Description of Artificial Sequence:  Enzymatic Nucleic Acid
agaagtagggctagctacaacgacagaagaa

SEQ ID NO: 19495 - DNA, 31 bp, Artificial Sequence
  Description of Artificial Sequence:  Enzymatic Nucleic Acid
acaagaagggctagctacaacgaagccagaa

SEQ ID NO: 19496 - DNA, 31 bp, Artificial Sequence
  Description of Artificial Sequence:  Enzymatic Nucleic Acid
gatgatgaggctagctacaacgaaagaagta

SEQ ID NO: 19497 - DNA, 31 bp, Artificial Sequence
  Description of Artificial Sequence:  Enzymatic Nucleic Acid
taggatgaggctagctacaacgagacaagaa

SEQ ID NO: 19498 - DNA, 31 bp, Artificial Sequence
  Description of Artificial Sequence:  Enzymatic Nucleic Acid
ccgtaggaggctagctacaacgagatgacaa

SEQ ID NO: 19499 - DNA, 31 bp, Artificial Sequence
  Description of Artificial Sequence:  Enzymatic Nucleic Acid
acggtccgggctagctacaacgaaggatgat

SEQ ID NO: 19500 - DNA, 31 bp, Artificial Sequence
  Description of Artificial Sequence:  Enzymatic Nucleic Acid
cttaacggggctagctacaacgaccgtagga

SEQ ID NO: 19501 - DNA, 31 bp, Artificial Sequence
  Description of Artificial Sequence:  Enzymatic Nucleic Acid
ccgcttaaggctagctacaacgaggtccgta

SEQ ID NO: 19502 - DNA, 31 bp, Artificial Sequence
  Description of Artificial Sequence:  Enzymatic Nucleic Acid
ttggcccgggctagctacaacgattaacggt

SEQ ID NO: 19503 - DNA, 31 bp, Artificial Sequence
  Description of Artificial Sequence:  Enzymatic Nucleic Acid
tccattggggctagctacaacgaccgcttaa

SEQ ID NO: 19504 - DNA, 31 bp, Artificial Sequence
  Description of Artificial Sequence:  Enzymatic Nucleic Acid
cccctccaggctagctacaacgatggcccgc

SEQ ID NO: 19505 - DNA, 31 bp, Artificial Sequence
  Description of Artificial Sequence:  Enzymatic Nucleic Acid
gtcttcagggctagctacaacgatcccctcc

SEQ ID NO: 19506 - DNA, 31 bp, Artificial Sequence
  Description of Artificial Sequence:  Enzymatic Nucleic Acid
gtagcctgggctagctacaacgacttcagtt

SEQ ID NO: 19507 - DNA, 31 bp, Artificial Sequence
  Description of Artificial Sequence:  Enzymatic Nucleic Acid
acaagtagggctagctacaacgactgtcttc

SEQ ID NO: 19508 - DNA, 31 bp, Artificial Sequence
  Description of Artificial Sequence:  Enzymatic Nucleic Acid
tggacaagggctagctacaacgaagcctgtc

SEQ ID NO: 19509 - DNA, 31 bp, Artificial Sequence
  Description of Artificial Sequence:  Enzymatic Nucleic Acid
acgatggaggctagctacaacgaaagtagcc

SEQ ID NO: 19510 - DNA, 31 bp, Artificial Sequence
  Description of Artificial Sequence:  Enzymatic Nucleic Acid
catgacgaggctagctacaacgaggacaagt

SEQ ID NO: 19511 - DNA, 31 bp, Artificial Sequence
  Description of Artificial Sequence:  Enzymatic Nucleic Acid
atccatgaggctagctacaacgagatggaca

SEQ ID NO: 19512 - DNA, 31 bp, Artificial Sequence
  Description of Artificial Sequence:  Enzymatic Nucleic Acid
tggatccaggctagctacaacgagacgatgg

SEQ ID NO: 19513 - DNA, 31 bp, Artificial Sequence
  Description of Artificial Sequence:  Enzymatic Nucleic Acid
catctggaggctagctacaacgaccatgacg

SEQ ID NO: 19514 - DNA, 31 bp, Artificial Sequence
  Description of Artificial Sequence:  Enzymatic Nucleic Acid
ggagttcaggctagctacaacgactggatcc

SEQ ID NO: 19515 - DNA, 31 bp, Artificial Sequence
  Description of Artificial Sequence:  Enzymatic Nucleic Acid
aatgggagggctagctacaacgatcatctgg

SEQ ID NO: 19516 - DNA, 31 bp, Artificial Sequence
  Description of Artificial Sequence:  Enzymatic Nucleic Acid
tcatccaaggctagctacaacgagggagttc

SEQ ID NO: 19517 - DNA, 31 bp, Artificial Sequence
  Description of Artificial Sequence:  Enzymatic Nucleic Acid
aatgttcaggctagctacaacgaccaatggg

SEQ ID NO: 19518 - DNA, 31 bp, Artificial Sequence
  Description of Artificial Sequence:  Enzymatic Nucleic Acid
tcacaatgggctagctacaacgatcatccaa

SEQ ID NO: 19519 - DNA, 31 bp, Artificial Sequence
  Description of Artificial Sequence:  Enzymatic Nucleic Acid
gttcacaaggctagctacaacgagttcatcc

SEQ ID NO: 19520 - DNA, 31 bp, Artificial Sequence
  Description of Artificial Sequence:  Enzymatic Nucleic Acid
gtcgttcaggctagctacaacgaaatgttca

SEQ ID NO: 19521 - DNA, 31 bp, Artificial Sequence
  Description of Artificial Sequence:  Enzymatic Nucleic Acid
ggcagtcgggctagctacaacgatcacaatg

SEQ ID NO: 19522 - DNA, 31 bp, Artificial Sequence
  Description of Artificial Sequence:  Enzymatic Nucleic Acid
taaggcagggctagctacaacgacgttcaca

SEQ ID NO: 19523 - DNA, 31 bp, Artificial Sequence
  Description of Artificial Sequence:  Enzymatic Nucleic Acid
tcataaggggctagctacaacgaagtcgttc

SEQ ID NO: 19524 - DNA, 31 bp, Artificial Sequence
  Description of Artificial Sequence:  Enzymatic Nucleic Acid
tggcatcaggctagctacaacgaaaggcagt

SEQ ID NO: 19525 - DNA, 31 bp, Artificial Sequence
  Description of Artificial Sequence:  Enzymatic Nucleic Acid
tgctggcaggctagctacaacgacataaggc

SEQ ID NO: 19526 - DNA, 31 bp, Artificial Sequence
  Description of Artificial Sequence:  Enzymatic Nucleic Acid
tttgctggggctagctacaacgaatcataag

SEQ ID NO: 19527 - DNA, 31 bp, Artificial Sequence
  Description of Artificial Sequence:  Enzymatic Nucleic Acid
cccatttgggctagctacaacgatggcatca

SEQ ID NO: 19528 - DNA, 31 bp, Artificial Sequence
  Description of Artificial Sequence:  Enzymatic Nucleic Acid
aattcccaggctagctacaacgattgctggc

SEQ ID NO: 19529 - DNA, 31 bp, Artificial Sequence
  Description of Artificial Sequence:  Enzymatic Nucleic Acid
ctggggaaggctagctacaacgatcccattt

SEQ ID NO: 19530 - DNA, 31 bp, Artificial Sequence
  Description of Artificial Sequence:  Enzymatic Nucleic Acid
tcagccggggctagctacaacgactctgggg

SEQ ID NO: 19531 - DNA, 31 bp, Artificial Sequence
  Description of Artificial Sequence:  Enzymatic Nucleic Acid
agcttcagggctagctacaacgacggtctct

SEQ ID NO: 19532 - DNA, 31 bp, Artificial Sequence
  Description of Artificial Sequence:  Enzymatic Nucleic Acid
ttacctagggctagctacaacgattcagccg

SEQ ID NO: 19533 - DNA, 31 bp, Artificial Sequence
  Description of Artificial Sequence:  Enzymatic Nucleic Acid
gaggcttaggctagctacaacgactagcttc

SEQ ID NO: 19534 - DNA, 31 bp, Artificial Sequence
  Description of Artificial Sequence:  Enzymatic Nucleic Acid
ccaagaggggctagctacaacgattacctag

SEQ ID NO: 19535 - DNA, 31 bp, Artificial Sequence
  Description of Artificial Sequence:  Enzymatic Nucleic Acid
caccacggggctagctacaacgacaagaggc

SEQ ID NO: 19536 - DNA, 31 bp, Artificial Sequence
  Description of Artificial Sequence:  Enzymatic Nucleic Acid
aggcaccaggctagctacaacgaggccaaga

SEQ ID NO: 19537 - DNA, 31 bp, Artificial Sequence
  Description of Artificial Sequence:  Enzymatic Nucleic Acid
caaaggcaggctagctacaacgacacggcca

SEQ ID NO: 19538 - DNA, 31 bp, Artificial Sequence
  Description of Artificial Sequence:  Enzymatic Nucleic Acid
gccaaaggggctagctacaacgaaccacggc

SEQ ID NO: 19539 - DNA, 31 bp, Artificial Sequence
  Description of Artificial Sequence:  Enzymatic Nucleic Acid
tcacttggggctagctacaacgacaaaggca

SEQ ID NO: 19540 - DNA, 31 bp, Artificial Sequence
  Description of Artificial Sequence:  Enzymatic Nucleic Acid
ttcaatcaggctagctacaacgattggccaa

SEQ ID NO: 19541 - DNA, 31 bp, Artificial Sequence
  Description of Artificial Sequence:  Enzymatic Nucleic Acid
tgcttcaaggctagctacaacgacacttggc

SEQ ID NO: 19542 - DNA, 31 bp, Artificial Sequence
  Description of Artificial Sequence:  Enzymatic Nucleic Acid
ggcatctgggctagctacaacgattcaatca

SEQ ID NO: 19543 - DNA, 31 bp, Artificial Sequence
  Description of Artificial Sequence:  Enzymatic Nucleic Acid
caaaggcaggctagctacaacgactgcttca

SEQ ID NO: 19544 - DNA, 31 bp, Artificial Sequence
  Description of Artificial Sequence:  Enzymatic Nucleic Acid
tccaaaggggctagctacaacgaatctgctt

SEQ ID NO: 19545 - DNA, 31 bp, Artificial Sequence
  Description of Artificial Sequence:  Enzymatic Nucleic Acid
cttgtcaaggctagctacaacgatccaaagg

SEQ ID NO: 19546 - DNA, 31 bp, Artificial Sequence
  Description of Artificial Sequence:  Enzymatic Nucleic Acid
ctgtcttgggctagctacaacgacaattcca

SEQ ID NO: 19547 - DNA, 31 bp, Artificial Sequence
  Description of Artificial Sequence:  Enzymatic Nucleic Acid
agttgctgggctagctacaacgacttgtcaa

SEQ ID NO: 19548 - DNA, 31 bp, Artificial Sequence
  Description of Artificial Sequence:  Enzymatic Nucleic Acid
gcaagttgggctagctacaacgatgtcttgt

SEQ ID NO: 19549 - DNA, 31 bp, Artificial Sequence
  Description of Artificial Sequence:  Enzymatic Nucleic Acid
cctgcaagggctagctacaacgatgctgtct

SEQ ID NO: 19550 - DNA, 31 bp, Artificial Sequence
  Description of Artificial Sequence:  Enzymatic Nucleic Acid
ctgtcctgggctagctacaacgaaagttgct

SEQ ID NO: 19551 - DNA, 31 bp, Artificial Sequence
  Description of Artificial Sequence:  Enzymatic Nucleic Acid
tgctactgggctagctacaacgacctgcaag

SEQ ID NO: 19552 - DNA, 31 bp, Artificial Sequence
  Description of Artificial Sequence:  Enzymatic Nucleic Acid
gactgctaggctagctacaacgatgtcctgc

SEQ ID NO: 19553 - DNA, 31 bp, Artificial Sequence
  Description of Artificial Sequence:  Enzymatic Nucleic Acid
tttgactgggctagctacaacgatactgtcc

SEQ ID NO: 19554 - DNA, 31 bp, Artificial Sequence
  Description of Artificial Sequence:  Enzymatic Nucleic Acid
cattttgaggctagctacaacgatgctactg

SEQ ID NO: 19555 - DNA, 31 bp, Artificial Sequence
  Description of Artificial Sequence:  Enzymatic Nucleic Acid
tttcaacaggctagctacaacgatttgactg

SEQ ID NO: 19556 - DNA, 31 bp, Artificial Sequence
  Description of Artificial Sequence:  Enzymatic Nucleic Acid
tctttcaaggctagctacaacgaattttgac

SEQ ID NO: 19557 - DNA, 31 bp, Artificial Sequence
  Description of Artificial Sequence:  Enzymatic Nucleic Acid
gtgtgttgggctagctacaacgatccttctt

SEQ ID NO: 19558 - DNA, 31 bp, Artificial Sequence
  Description of Artificial Sequence:  Enzymatic Nucleic Acid
actgtgtgggctagctacaacgatgctcctt

SEQ ID NO: 19559 - DNA, 31 bp, Artificial Sequence
  Description of Artificial Sequence:  Enzymatic Nucleic Acid
tcactgtgggctagctacaacgagttgctcc

SEQ ID NO: 19560 - DNA, 31 bp, Artificial Sequence
  Description of Artificial Sequence:  Enzymatic Nucleic Acid
gctcactgggctagctacaacgagtgttgct

SEQ ID NO: 19561 - DNA, 31 bp, Artificial Sequence
  Description of Artificial Sequence:  Enzymatic Nucleic Acid
gatgctcaggctagctacaacgatgtgtgtt

SEQ ID NO: 19562 - DNA, 31 bp, Artificial Sequence
  Description of Artificial Sequence:  Enzymatic Nucleic Acid
gctcgatgggctagctacaacgatcactgtg

SEQ ID NO: 19563 - DNA, 31 bp, Artificial Sequence
  Description of Artificial Sequence:  Enzymatic Nucleic Acid
gagctcgaggctagctacaacgagctcactg

SEQ ID NO: 19564 - DNA, 31 bp, Artificial Sequence
  Description of Artificial Sequence:  Enzymatic Nucleic Acid
catgagagggctagctacaacgatcgatgct

SEQ ID NO: 19565 - DNA, 31 bp, Artificial Sequence
  Description of Artificial Sequence:  Enzymatic Nucleic Acid
ttcagacaggctagctacaacgagagagctc

SEQ ID NO: 19566 - DNA, 31 bp, Artificial Sequence
  Description of Artificial Sequence:  Enzymatic Nucleic Acid
agttcagaggctagctacaacgaatgagagc

SEQ ID NO: 19567 - DNA, 31 bp, Artificial Sequence
  Description of Artificial Sequence:  Enzymatic Nucleic Acid
atcttgagggctagctacaacgatcagacat

SEQ ID NO: 19568 - DNA, 31 bp, Artificial Sequence
  Description of Artificial Sequence:  Enzymatic Nucleic Acid
aatgaggaggctagctacaacgacttgagtt

SEQ ID NO: 19569 - DNA, 31 bp, Artificial Sequence
  Description of Artificial Sequence:  Enzymatic Nucleic Acid
aatatgaaggctagctacaacgagaggatct

SEQ ID NO: 19570 - DNA, 31 bp, Artificial Sequence
  Description of Artificial Sequence:  Enzymatic Nucleic Acid
gaccaataggctagctacaacgagaatgagg

SEQ ID NO: 19571 - DNA, 31 bp, Artificial Sequence
  Description of Artificial Sequence:  Enzymatic Nucleic Acid
gtgaccaaggctagctacaacgaatgaatga

SEQ ID NO: 19572 - DNA, 31 bp, Artificial Sequence
  Description of Artificial Sequence:  Enzymatic Nucleic Acid
gatggtgaggctagctacaacgacaatatga

SEQ ID NO: 19573 - DNA, 31 bp, Artificial Sequence
  Description of Artificial Sequence:  Enzymatic Nucleic Acid
tgagatggggctagctacaacgagaccaata

SEQ ID NO: 19574 - DNA, 31 bp, Artificial Sequence
  Description of Artificial Sequence:  Enzymatic Nucleic Acid
cattgagaggctagctacaacgaggtgacca

SEQ ID NO: 19575 - DNA, 31 bp, Artificial Sequence
  Description of Artificial Sequence:  Enzymatic Nucleic Acid
tgaccacaggctagctacaacgatgagatgg

SEQ ID NO: 19576 - DNA, 31 bp, Artificial Sequence
  Description of Artificial Sequence:  Enzymatic Nucleic Acid
gttgaccaggctagctacaacgaattgagat

SEQ ID NO: 19577 - DNA, 31 bp, Artificial Sequence
  Description of Artificial Sequence:  Enzymatic Nucleic Acid
aaggttgaggctagctacaacgacacattga

SEQ ID NO: 19578 - DNA, 31 bp, Artificial Sequence
  Description of Artificial Sequence:  Enzymatic Nucleic Acid
ctagaaggggctagctacaacgatgaccaca

SEQ ID NO: 19579 - DNA, 31 bp, Artificial Sequence
  Description of Artificial Sequence:  Enzymatic Nucleic Acid
tacaggcaggctagctacaacgactagaagg

SEQ ID NO: 19580 - DNA, 31 bp, Artificial Sequence
  Description of Artificial Sequence:  Enzymatic Nucleic Acid
ggtacaggggctagctacaacgaacctagaa

SEQ ID NO: 19581 - DNA, 31 bp, Artificial Sequence
  Description of Artificial Sequence:  Enzymatic Nucleic Acid
gcttggtaggctagctacaacgaaggcacct

SEQ ID NO: 19582 - DNA, 31 bp, Artificial Sequence
  Description of Artificial Sequence:  Enzymatic Nucleic Acid
tggcttggggctagctacaacgaacaggcac

SEQ ID NO: 19583 - DNA, 31 bp, Artificial Sequence
  Description of Artificial Sequence:  Enzymatic Nucleic Acid
cctcctggggctagctacaacgattggtaca

SEQ ID NO: 19584 - DNA, 31 bp, Artificial Sequence
  Description of Artificial Sequence:  Enzymatic Nucleic Acid
atgagtggggctagctacaacgacctcctgg

SEQ ID NO: 19585 - DNA, 31 bp, Artificial Sequence
  Description of Artificial Sequence:  Enzymatic Nucleic Acid
accatgagggctagctacaacgaggccctcc

SEQ ID NO: 19586 - DNA, 31 bp, Artificial Sequence
  Description of Artificial Sequence:  Enzymatic Nucleic Acid
aatcaccaggctagctacaacgagagtggcc

SEQ ID NO: 19587 - DNA, 31 bp, Artificial Sequence
  Description of Artificial Sequence:  Enzymatic Nucleic Acid
cacaatcaggctagctacaacgacatgagtg

SEQ ID NO: 19588 - DNA, 31 bp, Artificial Sequence
  Description of Artificial Sequence:  Enzymatic Nucleic Acid
ttccacaaggctagctacaacgacaccatga

SEQ ID NO: 19589 - DNA, 31 bp, Artificial Sequence
  Description of Artificial Sequence:  Enzymatic Nucleic Acid
gaattccaggctagctacaacgaaatcacca

SEQ ID NO: 19590 - DNA, 31 bp, Artificial Sequence
  Description of Artificial Sequence:  Enzymatic Nucleic Acid
ttgcagaaggctagctacaacgatccacaat

SEQ ID NO: 19591 - DNA, 31 bp, Artificial Sequence
  Description of Artificial Sequence:  Enzymatic Nucleic Acid
caaatttgggctagctacaacgaagaattcc

SEQ ID NO: 19592 - DNA, 31 bp, Artificial Sequence
  Description of Artificial Sequence:  Enzymatic Nucleic Acid
tttccaaaggctagctacaacgattgcagaa

SEQ ID NO: 19593 - DNA, 31 bp, Artificial Sequence
  Description of Artificial Sequence:  Enzymatic Nucleic Acid
tggacaggggctagctacaacgattccaaat

SEQ ID NO: 19594 - DNA, 31 bp, Artificial Sequence
  Description of Artificial Sequence:  Enzymatic Nucleic Acid
taagtggaggctagctacaacgaaggtttcc

SEQ ID NO: 19595 - DNA, 31 bp, Artificial Sequence
  Description of Artificial Sequence:  Enzymatic Nucleic Acid
caggtaagggctagctacaacgaggacaggt

SEQ ID NO: 19596 - DNA, 31 bp, Artificial Sequence
  Description of Artificial Sequence:  Enzymatic Nucleic Acid
tcctcaggggctagctacaacgaaagtggac

SEQ ID NO: 19597 - DNA, 31 bp, Artificial Sequence
  Description of Artificial Sequence:  Enzymatic Nucleic Acid
ttctcttgggctagctacaacgatcctcagg

SEQ ID NO: 19598 - DNA, 31 bp, Artificial Sequence
  Description of Artificial Sequence:  Enzymatic Nucleic Acid
caaattcaggctagctacaacgattctcttg

SEQ ID NO: 19599 - DNA, 31 bp, Artificial Sequence
  Description of Artificial Sequence:  Enzymatic Nucleic Acid
gggacaaaggctagctacaacgatcatttct

SEQ ID NO: 19600 - DNA, 31 bp, Artificial Sequence
  Description of Artificial Sequence:  Enzymatic Nucleic Acid
gtaggggaggctagctacaacgaaaattcat

SEQ ID NO: 19601 - DNA, 31 bp, Artificial Sequence
  Description of Artificial Sequence:  Enzymatic Nucleic Acid
tggtcttgggctagctacaacgaaggggaca

SEQ ID NO: 19602 - DNA, 31 bp, Artificial Sequence
  Description of Artificial Sequence:  Enzymatic Nucleic Acid
ccctttggggctagctacaacgacttgtagg

SEQ ID NO: 19603 - DNA, 31 bp, Artificial Sequence
  Description of Artificial Sequence:  Enzymatic Nucleic Acid
gaatcgtgggctagctacaacgaccctttgg

SEQ ID NO: 19604 - DNA, 31 bp, Artificial Sequence
  Description of Artificial Sequence:  Enzymatic Nucleic Acid
cggaatcgggctagctacaacgagccccttt

SEQ ID NO: 19605 - DNA, 31 bp, Artificial Sequence
  Description of Artificial Sequence:  Enzymatic Nucleic Acid
tgacggaaggctagctacaacgacgtgcccc

SEQ ID NO: 19606 - DNA, 31 bp, Artificial Sequence
  Description of Artificial Sequence:  Enzymatic Nucleic Acid
tcccttgaggctagctacaacgaggaatcgt

SEQ ID NO: 19607 - DNA, 31 bp, Artificial Sequence
  Description of Artificial Sequence:  Enzymatic Nucleic Acid
caacgtagggctagctacaacgactttccct

SEQ ID NO: 19608 - DNA, 31 bp, Artificial Sequence
  Description of Artificial Sequence:  Enzymatic Nucleic Acid
ctccaacgggctagctacaacgaagtctttc

SEQ ID NO: 19609 - DNA, 31 bp, Artificial Sequence
  Description of Artificial Sequence:  Enzymatic Nucleic Acid
tgctccaaggctagctacaacgagtagtctt

SEQ ID NO: 19610 - DNA, 31 bp, Artificial Sequence
  Description of Artificial Sequence:  Enzymatic Nucleic Acid
agggattgggctagctacaacgatccaacgt

SEQ ID NO: 19611 - DNA, 31 bp, Artificial Sequence
  Description of Artificial Sequence:  Enzymatic Nucleic Acid
cacagggaggctagctacaacgatgctccaa

SEQ ID NO: 19612 - DNA, 31 bp, Artificial Sequence
  Description of Artificial Sequence:  Enzymatic Nucleic Acid
cagatccaggctagctacaacgaagggattg

SEQ ID NO: 19613 - DNA, 31 bp, Artificial Sequence
  Description of Artificial Sequence:  Enzymatic Nucleic Acid
gtttcagaggctagctacaacgaccacaggg

SEQ ID NO: 19614 - DNA, 31 bp, Artificial Sequence
  Description of Artificial Sequence:  Enzymatic Nucleic Acid
aagcgccgggctagctacaacgattcagatc

SEQ ID NO: 19615 - DNA, 31 bp, Artificial Sequence
  Description of Artificial Sequence:  Enzymatic Nucleic Acid
tccaagcgggctagctacaacgacgtttcag

SEQ ID NO: 19616 - DNA, 31 bp, Artificial Sequence
  Description of Artificial Sequence:  Enzymatic Nucleic Acid
tgtccaagggctagctacaacgagccgtttc

SEQ ID NO: 19617 - DNA, 31 bp, Artificial Sequence
  Description of Artificial Sequence:  Enzymatic Nucleic Acid
tgatgctgggctagctacaacgaccaagcgc

SEQ ID NO: 19618 - DNA, 31 bp, Artificial Sequence
  Description of Artificial Sequence:  Enzymatic Nucleic Acid
tggtgatgggctagctacaacgatgtccaag

SEQ ID NO: 19619 - DNA, 31 bp, Artificial Sequence
  Description of Artificial Sequence:  Enzymatic Nucleic Acid
actggtgaggctagctacaacgagctgtcca

SEQ ID NO: 19620 - DNA, 31 bp, Artificial Sequence
  Description of Artificial Sequence:  Enzymatic Nucleic Acid
gctactggggctagctacaacgagatgctgt

SEQ ID NO: 19621 - DNA, 31 bp, Artificial Sequence
  Description of Artificial Sequence:  Enzymatic Nucleic Acid
tctggctaggctagctacaacgatggtgatg

SEQ ID NO: 19622 - DNA, 31 bp, Artificial Sequence
  Description of Artificial Sequence:  Enzymatic Nucleic Acid
agctctggggctagctacaacgatactggtg

SEQ ID NO: 19623 - DNA, 31 bp, Artificial Sequence
  Description of Artificial Sequence:  Enzymatic Nucleic Acid
tggctgagggctagctacaacgatctggcta

SEQ ID NO: 19624 - DNA, 31 bp, Artificial Sequence
  Description of Artificial Sequence:  Enzymatic Nucleic Acid
agagctggggctagctacaacgatgagctct

SEQ ID NO: 19625 - DNA, 31 bp, Artificial Sequence
  Description of Artificial Sequence:  Enzymatic Nucleic Acid
atccagagggctagctacaacgatggctgag

SEQ ID NO: 19626 - DNA, 31 bp, Artificial Sequence
  Description of Artificial Sequence:  Enzymatic Nucleic Acid
tccacaaaggctagctacaacgaccagagct

SEQ ID NO: 19627 - DNA, 31 bp, Artificial Sequence
  Description of Artificial Sequence:  Enzymatic Nucleic Acid
ctcctccaggctagctacaacgaaaatccag

SEQ ID NO: 19628 - DNA, 31 bp, Artificial Sequence
  Description of Artificial Sequence:  Enzymatic Nucleic Acid
ctgagggaggctagctacaacgattctcctc

SEQ ID NO: 19629 - DNA, 31 bp, Artificial Sequence
  Description of Artificial Sequence:  Enzymatic Nucleic Acid
ctacatcaggctagctacaacgatgagggac

SEQ ID NO: 19630 - DNA, 31 bp, Artificial Sequence
  Description of Artificial Sequence:  Enzymatic Nucleic Acid
cttctacaggctagctacaacgacactgagg

SEQ ID NO: 19631 - DNA, 31 bp, Artificial Sequence
  Description of Artificial Sequence:  Enzymatic Nucleic Acid
ttcttctaggctagctacaacgaatcactga

SEQ ID NO: 19632 - DNA, 31 bp, Artificial Sequence
  Description of Artificial Sequence:  Enzymatic Nucleic Acid
ttcaggagggctagctacaacgattcctctt

SEQ ID NO: 19633 - DNA, 31 bp, Artificial Sequence
  Description of Artificial Sequence:  Enzymatic Nucleic Acid
tatacagaggctagctacaacgacttcagga

SEQ ID NO: 19634 - DNA, 31 bp, Artificial Sequence
  Description of Artificial Sequence:  Enzymatic Nucleic Acid
tccttataggctagctacaacgaagatcttc

SEQ ID NO: 19635 - DNA, 31 bp, Artificial Sequence
  Description of Artificial Sequence:  Enzymatic Nucleic Acid
agtccttaggctagctacaacgaacagatct

SEQ ID NO: 19636 - DNA, 31 bp, Artificial Sequence
  Description of Artificial Sequence:  Enzymatic Nucleic Acid
tcaggaagggctagctacaacgaccttatac

SEQ ID NO: 19637 - DNA, 31 bp, Artificial Sequence
  Description of Artificial Sequence:  Enzymatic Nucleic Acid
ctccaaggggctagctacaacgacaggaagt

SEQ ID NO: 19638 - DNA, 31 bp, Artificial Sequence
  Description of Artificial Sequence:  Enzymatic Nucleic Acid
atgagatgggctagctacaacgatccaaggt

SEQ ID NO: 19639 - DNA, 31 bp, Artificial Sequence
  Description of Artificial Sequence:  Enzymatic Nucleic Acid
agatgagaggctagctacaacgagctccaag

SEQ ID NO: 19640 - DNA, 31 bp, Artificial Sequence
  Description of Artificial Sequence:  Enzymatic Nucleic Acid
gtaacagaggctagctacaacgagagatgct

SEQ ID NO: 19641 - DNA, 31 bp, Artificial Sequence
  Description of Artificial Sequence:  Enzymatic Nucleic Acid
agctgtaaggctagctacaacgaagatgaga

SEQ ID NO: 19642 - DNA, 31 bp, Artificial Sequence
  Description of Artificial Sequence:  Enzymatic Nucleic Acid
ggaagctgggctagctacaacgaaacagatg

SEQ ID NO: 19643 - DNA, 31 bp, Artificial Sequence
  Description of Artificial Sequence:  Enzymatic Nucleic Acid
cttggaagggctagctacaacgatgtaacag

SEQ ID NO: 19644 - DNA, 31 bp, Artificial Sequence
  Description of Artificial Sequence:  Enzymatic Nucleic Acid
cttagccaggctagctacaacgattggaagc

SEQ ID NO: 19645 - DNA, 31 bp, Artificial Sequence
  Description of Artificial Sequence:  Enzymatic Nucleic Acid
gcccttagggctagctacaacgacacttgga

SEQ ID NO: 19646 - DNA, 31 bp, Artificial Sequence
  Description of Artificial Sequence:  Enzymatic Nucleic Acid
actccatgggctagctacaacgaccttagcc

SEQ ID NO: 19647 - DNA, 31 bp, Artificial Sequence
  Description of Artificial Sequence:  Enzymatic Nucleic Acid
gaactccaggctagctacaacgagcccttag

SEQ ID NO: 19648 - DNA, 31 bp, Artificial Sequence
  Description of Artificial Sequence:  Enzymatic Nucleic Acid
gccaagaaggctagctacaacgatccatgcc

SEQ ID NO: 19649 - DNA, 31 bp, Artificial Sequence
  Description of Artificial Sequence:  Enzymatic Nucleic Acid
tcgcgatgggctagctacaacgacaagaact

SEQ ID NO: 19650 - DNA, 31 bp, Artificial Sequence
  Description of Artificial Sequence:  Enzymatic Nucleic Acid
tttcgcgaggctagctacaacgagccaagaa

SEQ ID NO: 19651 - DNA, 31 bp, Artificial Sequence
  Description of Artificial Sequence:  Enzymatic Nucleic Acid
cactttcgggctagctacaacgagatgccaa

SEQ ID NO: 19652 - DNA, 31 bp, Artificial Sequence
  Description of Artificial Sequence:  Enzymatic Nucleic Acid
tggatacaggctagctacaacgatttcgcga

SEQ ID NO: 19653 - DNA, 31 bp, Artificial Sequence
  Description of Artificial Sequence:  Enzymatic Nucleic Acid
tgtggataggctagctacaacgaactttcgc

SEQ ID NO: 19654 - DNA, 31 bp, Artificial Sequence
  Description of Artificial Sequence:  Enzymatic Nucleic Acid
cctgtggaggctagctacaacgaacactttc

SEQ ID NO: 19655 - DNA, 31 bp, Artificial Sequence
  Description of Artificial Sequence:  Enzymatic Nucleic Acid
ggtccctgggctagctacaacgaggatacac

SEQ ID NO: 19656 - DNA, 31 bp, Artificial Sequence
  Description of Artificial Sequence:  Enzymatic Nucleic Acid
ccgccaggggctagctacaacgaccctgtgg

SEQ ID NO: 19657 - DNA, 31 bp, Artificial Sequence
  Description of Artificial Sequence:  Enzymatic Nucleic Acid
tcgtgccgggctagctacaacgacaggtccc

SEQ ID NO: 19658 - DNA, 31 bp, Artificial Sequence
  Description of Artificial Sequence:  Enzymatic Nucleic Acid
atttcgtgggctagctacaacgacgccaggt

SEQ ID NO: 19659 - DNA, 31 bp, Artificial Sequence
  Description of Artificial Sequence:  Enzymatic Nucleic Acid
atatttcgggctagctacaacgagccgccag

SEQ ID NO: 19660 - DNA, 31 bp, Artificial Sequence
  Description of Artificial Sequence:  Enzymatic Nucleic Acid
agaggataggctagctacaacgattcgtgcc

SEQ ID NO: 19661 - DNA, 31 bp, Artificial Sequence
  Description of Artificial Sequence:  Enzymatic Nucleic Acid
taagaggaggctagctacaacgaatttcgtg

SEQ ID NO: 19662 - DNA, 31 bp, Artificial Sequence
  Description of Artificial Sequence:  Enzymatic Nucleic Acid
ttctccgaggctagctacaacgaaagaggat

SEQ ID NO: 19663 - DNA, 31 bp, Artificial Sequence
  Description of Artificial Sequence:  Enzymatic Nucleic Acid
taaccacgggctagctacaacgatcttctcc

SEQ ID NO: 19664 - DNA, 31 bp, Artificial Sequence
  Description of Artificial Sequence:  Enzymatic Nucleic Acid
tttaaccaggctagctacaacgagttcttct

SEQ ID NO: 19665 - DNA, 31 bp, Artificial Sequence
  Description of Artificial Sequence:  Enzymatic Nucleic Acid
gattttaaggctagctacaacgacacgttct

SEQ ID NO: 19666 - DNA, 31 bp, Artificial Sequence
  Description of Artificial Sequence:  Enzymatic Nucleic Acid
gtcacagaggctagctacaacgatttaacca

SEQ ID NO: 19667 - DNA, 31 bp, Artificial Sequence
  Description of Artificial Sequence:  Enzymatic Nucleic Acid
caaagtcaggctagctacaacgaagatttta

SEQ ID NO: 19668 - DNA, 31 bp, Artificial Sequence
  Description of Artificial Sequence:  Enzymatic Nucleic Acid
agccaaagggctagctacaacgacacagatt

SEQ ID NO: 19669 - DNA, 31 bp, Artificial Sequence
  Description of Artificial Sequence:  Enzymatic Nucleic Acid
gggccaagggctagctacaacgacaaagtca

SEQ ID NO: 19670 - DNA, 31 bp, Artificial Sequence
  Description of Artificial Sequence:  Enzymatic Nucleic Acid
atcccgggggctagctacaacgacaagccaa

SEQ ID NO: 19671 - DNA, 31 bp, Artificial Sequence
  Description of Artificial Sequence:  Enzymatic Nucleic Acid
tataaataggctagctacaacgacccgggcc

SEQ ID NO: 19672 - DNA, 31 bp, Artificial Sequence
  Description of Artificial Sequence:  Enzymatic Nucleic Acid
tttataaaggctagctacaacgaatcccggg

SEQ ID NO: 19673 - DNA, 31 bp, Artificial Sequence
  Description of Artificial Sequence:  Enzymatic Nucleic Acid
gatctttaggctagctacaacgaaaatatcc

SEQ ID NO: 19674 - DNA, 31 bp, Artificial Sequence
  Description of Artificial Sequence:  Enzymatic Nucleic Acid
aatctggaggctagctacaacgactttataa

SEQ ID NO: 19675 - DNA, 31 bp, Artificial Sequence
  Description of Artificial Sequence:  Enzymatic Nucleic Acid
tgacataaggctagctacaacgactggatct

SEQ ID NO: 19676 - DNA, 31 bp, Artificial Sequence
  Description of Artificial Sequence:  Enzymatic Nucleic Acid
ttctgacaggctagctacaacgaaatctgga

SEQ ID NO: 19677 - DNA, 31 bp, Artificial Sequence
  Description of Artificial Sequence:  Enzymatic Nucleic Acid
ttttctgaggctagctacaacgaataatctg

SEQ ID NO: 19678 - DNA, 31 bp, Artificial Sequence
  Description of Artificial Sequence:  Enzymatic Nucleic Acid
ggcgagcaggctagctacaacgactcctttt

SEQ ID NO: 19679 - DNA, 31 bp, Artificial Sequence
  Description of Artificial Sequence:  Enzymatic Nucleic Acid
gaggcgagggctagctacaacgaatctcctt

SEQ ID NO: 19680 - DNA, 31 bp, Artificial Sequence
  Description of Artificial Sequence:  Enzymatic Nucleic Acid
aagggaggggctagctacaacgagagcatct

SEQ ID NO: 19681 - DNA, 31 bp, Artificial Sequence
  Description of Artificial Sequence:  Enzymatic Nucleic Acid
gccatccaggctagctacaacgattcaaagg

SEQ ID NO: 19682 - DNA, 31 bp, Artificial Sequence
  Description of Artificial Sequence:  Enzymatic Nucleic Acid
tggggccaggctagctacaacgaccatttca

SEQ ID NO: 19683 - DNA, 31 bp, Artificial Sequence
  Description of Artificial Sequence:  Enzymatic Nucleic Acid
ttctggggggctagctacaacgacatccatt

SEQ ID NO: 19684 - DNA, 31 bp, Artificial Sequence
  Description of Artificial Sequence:  Enzymatic Nucleic Acid
aaaaattgggctagctacaacgattctgggg

SEQ ID NO: 19685 - DNA, 31 bp, Artificial Sequence
  Description of Artificial Sequence:  Enzymatic Nucleic Acid
gtcaaaaaggctagctacaacgatgtttctg

SEQ ID NO: 19686 - DNA, 31 bp, Artificial Sequence
  Description of Artificial Sequence:  Enzymatic Nucleic Acid
acactctgggctagctacaacgacaaaaatt

SEQ ID NO: 19687 - DNA, 31 bp, Artificial Sequence
  Description of Artificial Sequence:  Enzymatic Nucleic Acid
tgtgtacaggctagctacaacgatctgtcaa

SEQ ID NO: 19688 - DNA, 31 bp, Artificial Sequence
  Description of Artificial Sequence:  Enzymatic Nucleic Acid
attgtgtaggctagctacaacgaactctgtc

SEQ ID NO: 19689 - DNA, 31 bp, Artificial Sequence
  Description of Artificial Sequence:  Enzymatic Nucleic Acid
ggattgtgggctagctacaacgaacactctg

SEQ ID NO: 19690 - DNA, 31 bp, Artificial Sequence
  Description of Artificial Sequence:  Enzymatic Nucleic Acid
ctggattgggctagctacaacgagtacactc

SEQ ID NO: 19691 - DNA, 31 bp, Artificial Sequence
  Description of Artificial Sequence:  Enzymatic Nucleic Acid
actctggaggctagctacaacgatgtgtaca

SEQ ID NO: 19692 - DNA, 31 bp, Artificial Sequence
  Description of Artificial Sequence:  Enzymatic Nucleic Acid
agacgtcaggctagctacaacgatctggatt

SEQ ID NO: 19693 - DNA, 31 bp, Artificial Sequence
  Description of Artificial Sequence:  Enzymatic Nucleic Acid
accagacgggctagctacaacgacactctgg

SEQ ID NO: 19694 - DNA, 31 bp, Artificial Sequence
  Description of Artificial Sequence:  Enzymatic Nucleic Acid
agaccagaggctagctacaacgagtcactct

SEQ ID NO: 19695 - DNA, 31 bp, Artificial Sequence
  Description of Artificial Sequence:  Enzymatic Nucleic Acid
ccaaaagaggctagctacaacgacagacgtc

SEQ ID NO: 19696 - DNA, 31 bp, Artificial Sequence
  Description of Artificial Sequence:  Enzymatic Nucleic Acid
gcaaaacaggctagctacaacgacaaaagac

SEQ ID NO: 19697 - DNA, 31 bp, Artificial Sequence
  Description of Artificial Sequence:  Enzymatic Nucleic Acid
cagcaaaaggctagctacaacgaaccaaaag

SEQ ID NO: 19698 - DNA, 31 bp, Artificial Sequence
  Description of Artificial Sequence:  Enzymatic Nucleic Acid
tcccacagggctagctacaacgaaaaacacc

SEQ ID NO: 19699 - DNA, 31 bp, Artificial Sequence
  Description of Artificial Sequence:  Enzymatic Nucleic Acid
atttcccaggctagctacaacgaagcaaaac

SEQ ID NO: 19700 - DNA, 31 bp, Artificial Sequence
  Description of Artificial Sequence:  Enzymatic Nucleic Acid
ggaaaataggctagctacaacgattcccaca

SEQ ID NO: 19701 - DNA, 31 bp, Artificial Sequence
  Description of Artificial Sequence:  Enzymatic Nucleic Acid
aaggaaaaggctagctacaacgaatttccca

SEQ ID NO: 19702 - DNA, 31 bp, Artificial Sequence
  Description of Artificial Sequence:  Enzymatic Nucleic Acid
gagaagcaggctagctacaacgactaaggaa

SEQ ID NO: 19703 - DNA, 31 bp, Artificial Sequence
  Description of Artificial Sequence:  Enzymatic Nucleic Acid
tggagaagggctagctacaacgaacctaagg

SEQ ID NO: 19704 - DNA, 31 bp, Artificial Sequence
  Description of Artificial Sequence:  Enzymatic Nucleic Acid
ccaggataggctagctacaacgaggagaagc

SEQ ID NO: 19705 - DNA, 31 bp, Artificial Sequence
  Description of Artificial Sequence:  Enzymatic Nucleic Acid
ccccaggaggctagctacaacgaatggagaa

SEQ ID NO: 19706 - DNA, 31 bp, Artificial Sequence
  Description of Artificial Sequence:  Enzymatic Nucleic Acid
aatctttaggctagctacaacgacccaggat

SEQ ID NO: 19707 - DNA, 31 bp, Artificial Sequence
  Description of Artificial Sequence:  Enzymatic Nucleic Acid
ttcatcaaggctagctacaacgactttaccc

SEQ ID NO: 19708 - DNA, 31 bp, Artificial Sequence
  Description of Artificial Sequence:  Enzymatic Nucleic Acid
attcttcaggctagctacaacgacaatcttt

SEQ ID NO: 19709 - DNA, 31 bp, Artificial Sequence
  Description of Artificial Sequence:  Enzymatic Nucleic Acid
ctacaaaaggctagctacaacgatcttcatc

SEQ ID NO: 19710 - DNA, 31 bp, Artificial Sequence
  Description of Artificial Sequence:  Enzymatic Nucleic Acid
atcgcctaggctagctacaacgaaaaattct

SEQ ID NO: 19711 - DNA, 31 bp, Artificial Sequence
  Description of Artificial Sequence:  Enzymatic Nucleic Acid
ttcaatcgggctagctacaacgactacaaaa

SEQ ID NO: 19712 - DNA, 31 bp, Artificial Sequence
  Description of Artificial Sequence:  Enzymatic Nucleic Acid
tctttcaaggctagctacaacgacgcctaca

SEQ ID NO: 19713 - DNA, 31 bp, Artificial Sequence
  Description of Artificial Sequence:  Enzymatic Nucleic Acid
cattctagggctagctacaacgatccttctt

SEQ ID NO: 19714 - DNA, 31 bp, Artificial Sequence
  Description of Artificial Sequence:  Enzymatic Nucleic Acid
ggccctcaggctagctacaacgatctagttc

SEQ ID NO: 19715 - DNA, 31 bp, Artificial Sequence
  Description of Artificial Sequence:  Enzymatic Nucleic Acid
atcaggggggctagctacaacgacctcattc

SEQ ID NO: 19716 - DNA, 31 bp, Artificial Sequence
  Description of Artificial Sequence:  Enzymatic Nucleic Acid
tagtataaggctagctacaacgacaggggcc

SEQ ID NO: 19717 - DNA, 31 bp, Artificial Sequence
  Description of Artificial Sequence:  Enzymatic Nucleic Acid
gtgtagtaggctagctacaacgaaatcaggg

SEQ ID NO: 19718 - DNA, 31 bp, Artificial Sequence
  Description of Artificial Sequence:  Enzymatic Nucleic Acid
tggtgtagggctagctacaacgaataatcag

SEQ ID NO: 19719 - DNA, 31 bp, Artificial Sequence
  Description of Artificial Sequence:  Enzymatic Nucleic Acid
ttctggtgggctagctacaacgaagtataat

SEQ ID NO: 19720 - DNA, 31 bp, Artificial Sequence
  Description of Artificial Sequence:  Enzymatic Nucleic Acid
atttctggggctagctacaacgagtagtata

SEQ ID NO: 19721 - DNA, 31 bp, Artificial Sequence
  Description of Artificial Sequence:  Enzymatic Nucleic Acid
ctggtacaggctagctacaacgattctggtg

SEQ ID NO: 19722 - DNA, 31 bp, Artificial Sequence
  Description of Artificial Sequence:  Enzymatic Nucleic Acid
gtctggtaggctagctacaacgaatttctgg

SEQ ID NO: 19723 - DNA, 31 bp, Artificial Sequence
  Description of Artificial Sequence:  Enzymatic Nucleic Acid
tggtctggggctagctacaacgaacatttct

SEQ ID NO: 19724 - DNA, 31 bp, Artificial Sequence
  Description of Artificial Sequence:  Enzymatic Nucleic Acid
cagcatggggctagctacaacgactggtaca

SEQ ID NO: 19725 - DNA, 31 bp, Artificial Sequence
  Description of Artificial Sequence:  Enzymatic Nucleic Acid
gtccagcaggctagctacaacgaggtctggt

SEQ ID NO: 19726 - DNA, 31 bp, Artificial Sequence
  Description of Artificial Sequence:  Enzymatic Nucleic Acid
cagtccagggctagctacaacgaatggtctg

SEQ ID NO: 19727 - DNA, 31 bp, Artificial Sequence
  Description of Artificial Sequence:  Enzymatic Nucleic Acid
cgtgccagggctagctacaacgaagtccagc

SEQ ID NO: 19728 - DNA, 31 bp, Artificial Sequence
  Description of Artificial Sequence:  Enzymatic Nucleic Acid
tccccgtgggctagctacaacgacagcagtc

SEQ ID NO: 19729 - DNA, 31 bp, Artificial Sequence
  Description of Artificial Sequence:  Enzymatic Nucleic Acid
gctccccgggctagctacaacgagccagcag

SEQ ID NO: 19730 - DNA, 31 bp, Artificial Sequence
  Description of Artificial Sequence:  Enzymatic Nucleic Acid
tgactgggggctagctacaacgatccccgtg

SEQ ID NO: 19731 - DNA, 31 bp, Artificial Sequence
  Description of Artificial Sequence:  Enzymatic Nucleic Acid
gtctctgaggctagctacaacgatgggctcc

SEQ ID NO: 19732 - DNA, 31 bp, Artificial Sequence
  Description of Artificial Sequence:  Enzymatic Nucleic Acid
aacgtgggggctagctacaacgactctgact

SEQ ID NO: 19733 - DNA, 31 bp, Artificial Sequence
  Description of Artificial Sequence:  Enzymatic Nucleic Acid
tgaaaacgggctagctacaacgagggtctct

SEQ ID NO: 19734 - DNA, 31 bp, Artificial Sequence
  Description of Artificial Sequence:  Enzymatic Nucleic Acid
tctgaaaaggctagctacaacgagtgggtct

SEQ ID NO: 19735 - DNA, 31 bp, Artificial Sequence
  Description of Artificial Sequence:  Enzymatic Nucleic Acid
tccaccaaggctagctacaacgatctgaaaa

SEQ ID NO: 19736 - DNA, 31 bp, Artificial Sequence
  Description of Artificial Sequence:  Enzymatic Nucleic Acid
atgttccaggctagctacaacgacaactctg

SEQ ID NO: 19737 - DNA, 31 bp, Artificial Sequence
  Description of Artificial Sequence:  Enzymatic Nucleic Acid
cccaaatgggctagctacaacgatccaccaa

SEQ ID NO: 19738 - DNA, 31 bp, Artificial Sequence
  Description of Artificial Sequence:  Enzymatic Nucleic Acid
ttcccaaaggctagctacaacgagttccacc

SEQ ID NO: 19739 - DNA, 31 bp, Artificial Sequence
  Description of Artificial Sequence:  Enzymatic Nucleic Acid
gcaagagaggctagctacaacgattcccaaa

SEQ ID NO: 19740 - DNA, 31 bp, Artificial Sequence
  Description of Artificial Sequence:  Enzymatic Nucleic Acid
ttagcttgggctagctacaacgaaagagatt

SEQ ID NO: 19741 - DNA, 31 bp, Artificial Sequence
  Description of Artificial Sequence:  Enzymatic Nucleic Acid
agcattagggctagctacaacgattgcaaga

SEQ ID NO: 19742 - DNA, 31 bp, Artificial Sequence
  Description of Artificial Sequence:  Enzymatic Nucleic Acid
gctgagcaggctagctacaacgatagcttgc

SEQ ID NO: 19743 - DNA, 31 bp, Artificial Sequence
  Description of Artificial Sequence:  Enzymatic Nucleic Acid
ctgctgagggctagctacaacgaattagctt

SEQ ID NO: 19744 - DNA, 31 bp, Artificial Sequence
  Description of Artificial Sequence:  Enzymatic Nucleic Acid
ccatcctgggctagctacaacgatgagcatt

SEQ ID NO: 19745 - DNA, 31 bp, Artificial Sequence
  Description of Artificial Sequence:  Enzymatic Nucleic Acid
ctttgccaggctagctacaacgacctgctga

SEQ ID NO: 19746 - DNA, 31 bp, Artificial Sequence
  Description of Artificial Sequence:  Enzymatic Nucleic Acid
agtctttgggctagctacaacgacatcctgc

SEQ ID NO: 19747 - DNA, 31 bp, Artificial Sequence
  Description of Artificial Sequence:  Enzymatic Nucleic Acid
caatgtagggctagctacaacgactttgcca

SEQ ID NO: 19748 - DNA, 31 bp, Artificial Sequence
  Description of Artificial Sequence:  Enzymatic Nucleic Acid
gaacaatgggctagctacaacgaagtctttg

SEQ ID NO: 19749 - DNA, 31 bp, Artificial Sequence
  Description of Artificial Sequence:  Enzymatic Nucleic Acid
aagaacaaggctagctacaacgagtagtctt

SEQ ID NO: 19750 - DNA, 31 bp, Artificial Sequence
  Description of Artificial Sequence:  Enzymatic Nucleic Acid
cggaagaaggctagctacaacgaaatgtagt

SEQ ID NO: 19751 - DNA, 31 bp, Artificial Sequence
  Description of Artificial Sequence:  Enzymatic Nucleic Acid
ctctgataggctagctacaacgacggaagaa

SEQ ID NO: 19752 - DNA, 31 bp, Artificial Sequence
  Description of Artificial Sequence:  Enzymatic Nucleic Acid
gtctctgaggctagctacaacgaatcggaag

SEQ ID NO: 19753 - DNA, 31 bp, Artificial Sequence
  Description of Artificial Sequence:  Enzymatic Nucleic Acid
gctcaaagggctagctacaacgactctgata

SEQ ID NO: 19754 - DNA, 31 bp, Artificial Sequence
  Description of Artificial Sequence:  Enzymatic Nucleic Acid
cttccatgggctagctacaacgatcaaagtc

SEQ ID NO: 19755 - DNA, 31 bp, Artificial Sequence
  Description of Artificial Sequence:  Enzymatic Nucleic Acid
ctcttccaggctagctacaacgagctcaaag

SEQ ID NO: 19756 - DNA, 31 bp, Artificial Sequence
  Description of Artificial Sequence:  Enzymatic Nucleic Acid
gtccagaaggctagctacaacgacctcttcc

SEQ ID NO: 19757 - DNA, 31 bp, Artificial Sequence
  Description of Artificial Sequence:  Enzymatic Nucleic Acid
agagagagggctagctacaacgaccagaatc

SEQ ID NO: 19758 - DNA, 31 bp, Artificial Sequence
  Description of Artificial Sequence:  Enzymatic Nucleic Acid
gaggtaggggctagctacaacgaagagagag

SEQ ID NO: 19759 - DNA, 31 bp, Artificial Sequence
  Description of Artificial Sequence:  Enzymatic Nucleic Acid
aggtgaggggctagctacaacgaaggcagag

SEQ ID NO: 19760 - DNA, 31 bp, Artificial Sequence
  Description of Artificial Sequence:  Enzymatic Nucleic Acid
gaaacaggggctagctacaacgagaggtagg

SEQ ID NO: 19761 - DNA, 31 bp, Artificial Sequence
  Description of Artificial Sequence:  Enzymatic Nucleic Acid
acaggaaaggctagctacaacgaaggtgagg

SEQ ID NO: 19762 - DNA, 31 bp, Artificial Sequence
  Description of Artificial Sequence:  Enzymatic Nucleic Acid
cctccataggctagctacaacgaaggaaaca

SEQ ID NO: 19763 - DNA, 31 bp, Artificial Sequence
  Description of Artificial Sequence:  Enzymatic Nucleic Acid
ctcctccaggctagctacaacgaacaggaaa

SEQ ID NO: 19764 - DNA, 31 bp, Artificial Sequence
  Description of Artificial Sequence:  Enzymatic Nucleic Acid
gtcacataggctagctacaacgattcctcct

SEQ ID NO: 19765 - DNA, 31 bp, Artificial Sequence
  Description of Artificial Sequence:  Enzymatic Nucleic Acid
gggtcacaggctagctacaacgaacttcctc

SEQ ID NO: 19766 - DNA, 31 bp, Artificial Sequence
  Description of Artificial Sequence:  Enzymatic Nucleic Acid
tggggtcaggctagctacaacgaatacttcc

SEQ ID NO: 19767 - DNA, 31 bp, Artificial Sequence
  Description of Artificial Sequence:  Enzymatic Nucleic Acid
atttggggggctagctacaacgacacatact

SEQ ID NO: 19768 - DNA, 31 bp, Artificial Sequence
  Description of Artificial Sequence:  Enzymatic Nucleic Acid
taatggaaggctagctacaacgattggggtc

SEQ ID NO: 19769 - DNA, 31 bp, Artificial Sequence
  Description of Artificial Sequence:  Enzymatic Nucleic Acid
tgtcataaggctagctacaacgaggaatttg

SEQ ID NO: 19770 - DNA, 31 bp, Artificial Sequence
  Description of Artificial Sequence:  Enzymatic Nucleic Acid
tgttgtcaggctagctacaacgaaatggaat

SEQ ID NO: 19771 - DNA, 31 bp, Artificial Sequence
  Description of Artificial Sequence:  Enzymatic Nucleic Acid
ctgtgttgggctagctacaacgacataatgg

SEQ ID NO: 19772 - DNA, 31 bp, Artificial Sequence
  Description of Artificial Sequence:  Enzymatic Nucleic Acid
ctgctgtgggctagctacaacgatgtcataa

SEQ ID NO: 19773 - DNA, 31 bp, Artificial Sequence
  Description of Artificial Sequence:  Enzymatic Nucleic Acid
tcctgctgggctagctacaacgagttgtcat

SEQ ID NO: 19774 - DNA, 31 bp, Artificial Sequence
  Description of Artificial Sequence:  Enzymatic Nucleic Acid
gattcctgggctagctacaacgatgtgttgt

SEQ ID NO: 19775 - DNA, 31 bp, Artificial Sequence
  Description of Artificial Sequence:  Enzymatic Nucleic Acid
ctgactgaggctagctacaacgatcctgctg

SEQ ID NO: 19776 - DNA, 31 bp, Artificial Sequence
  Description of Artificial Sequence:  Enzymatic Nucleic Acid
gatactgaggctagctacaacgatgattcct

SEQ ID NO: 19777 - DNA, 31 bp, Artificial Sequence
  Description of Artificial Sequence:  Enzymatic Nucleic Acid
tgcagataggctagctacaacgatgactgat

SEQ ID NO: 19778 - DNA, 31 bp, Artificial Sequence
  Description of Artificial Sequence:  Enzymatic Nucleic Acid
tctgcagaggctagctacaacgaactgactg

SEQ ID NO: 19779 - DNA, 31 bp, Artificial Sequence
  Description of Artificial Sequence:  Enzymatic Nucleic Acid
ctgttctgggctagctacaacgaagatactg

SEQ ID NO: 19780 - DNA, 31 bp, Artificial Sequence
  Description of Artificial Sequence:  Enzymatic Nucleic Acid
gcttactgggctagctacaacgatctgcaga

SEQ ID NO: 19781 - DNA, 31 bp, Artificial Sequence
  Description of Artificial Sequence:  Enzymatic Nucleic Acid
ttcgcttaggctagctacaacgatgttctgc

SEQ ID NO: 19782 - DNA, 31 bp, Artificial Sequence
  Description of Artificial Sequence:  Enzymatic Nucleic Acid
ctctttcgggctagctacaacgattactgtt

SEQ ID NO: 19783 - DNA, 31 bp, Artificial Sequence
  Description of Artificial Sequence:  Enzymatic Nucleic Acid
caggccggggctagctacaacgatctttcgc

SEQ ID NO: 19784 - DNA, 31 bp, Artificial Sequence
  Description of Artificial Sequence:  Enzymatic Nucleic Acid
ctcacaggggctagctacaacgacggctctt

SEQ ID NO: 19785 - DNA, 31 bp, Artificial Sequence
  Description of Artificial Sequence:  Enzymatic Nucleic Acid
tacactcaggctagctacaacgaaggccggc

SEQ ID NO: 19786 - DNA, 31 bp, Artificial Sequence
  Description of Artificial Sequence:  Enzymatic Nucleic Acid
tttttacaggctagctacaacgatcacaggc

SEQ ID NO: 19787 - DNA, 31 bp, Artificial Sequence
  Description of Artificial Sequence:  Enzymatic Nucleic Acid
tgtttttaggctagctacaacgaactcacag

SEQ ID NO: 19788 - DNA, 31 bp, Artificial Sequence
  Description of Artificial Sequence:  Enzymatic Nucleic Acid
ttcaaatgggctagctacaacgattttacac

SEQ ID NO: 19789 - DNA, 31 bp, Artificial Sequence
  Description of Artificial Sequence:  Enzymatic Nucleic Acid
tcttcaaaggctagctacaacgagtttttac

SEQ ID NO: 19790 - DNA, 31 bp, Artificial Sequence
  Description of Artificial Sequence:  Enzymatic Nucleic Acid
acgggataggctagctacaacgacttcaaat

SEQ ID NO: 19791 - DNA, 31 bp, Artificial Sequence
  Description of Artificial Sequence:  Enzymatic Nucleic Acid
taacgggaggctagctacaacgaatcttcaa

SEQ ID NO: 19792 - DNA, 31 bp, Artificial Sequence
  Description of Artificial Sequence:  Enzymatic Nucleic Acid
tcttctaaggctagctacaacgagggatatc

SEQ ID NO: 19793 - DNA, 31 bp, Artificial Sequence
  Description of Artificial Sequence:  Enzymatic Nucleic Acid
acttctggggctagctacaacgatcttctaa

SEQ ID NO: 19794 - DNA, 31 bp, Artificial Sequence
  Description of Artificial Sequence:  Enzymatic Nucleic Acid
tacttttaggctagctacaacgattctggtt

SEQ ID NO: 19795 - DNA, 31 bp, Artificial Sequence
  Description of Artificial Sequence:  Enzymatic Nucleic Acid
tgggattaggctagctacaacgattttactt

SEQ ID NO: 19796 - DNA, 31 bp, Artificial Sequence
  Description of Artificial Sequence:  Enzymatic Nucleic Acid
atctgggaggctagctacaacgatactttta

SEQ ID NO: 19797 - DNA, 31 bp, Artificial Sequence
  Description of Artificial Sequence:  Enzymatic Nucleic Acid
ggttgtcaggctagctacaacgactgggatt

SEQ ID NO: 19798 - DNA, 31 bp, Artificial Sequence
  Description of Artificial Sequence:  Enzymatic Nucleic Acid
tctggttgggctagctacaacgacatctggg

SEQ ID NO: 19799 - DNA, 31 bp, Artificial Sequence
  Description of Artificial Sequence:  Enzymatic Nucleic Acid
ccgtctggggctagctacaacgatgtcatct

SEQ ID NO: 19800 - DNA, 31 bp, Artificial Sequence
  Description of Artificial Sequence:  Enzymatic Nucleic Acid
actgtccgggctagctacaacgactggttgt

SEQ ID NO: 19801 - DNA, 31 bp, Artificial Sequence
  Description of Artificial Sequence:  Enzymatic Nucleic Acid
taccactgggctagctacaacgaccgtctgg

SEQ ID NO: 19802 - DNA, 31 bp, Artificial Sequence
  Description of Artificial Sequence:  Enzymatic Nucleic Acid
ccataccaggctagctacaacgatgtccgtc

SEQ ID NO: 19803 - DNA, 31 bp, Artificial Sequence
  Description of Artificial Sequence:  Enzymatic Nucleic Acid
gaaccataggctagctacaacgacactgtcc

SEQ ID NO: 19804 - DNA, 31 bp, Artificial Sequence
  Description of Artificial Sequence:  Enzymatic Nucleic Acid
aagaaccaggctagctacaacgaaccactgt

SEQ ID NO: 19805 - DNA, 31 bp, Artificial Sequence
  Description of Artificial Sequence:  Enzymatic Nucleic Acid
ggcaagaaggctagctacaacgacataccac

SEQ ID NO: 19806 - DNA, 31 bp, Artificial Sequence
  Description of Artificial Sequence:  Enzymatic Nucleic Acid
ttctgaggggctagctacaacgaaagaacca

SEQ ID NO: 19807 - DNA, 31 bp, Artificial Sequence
  Description of Artificial Sequence:  Enzymatic Nucleic Acid
gttttcagggctagctacaacgatcttctga

SEQ ID NO: 19808 - DNA, 31 bp, Artificial Sequence
  Description of Artificial Sequence:  Enzymatic Nucleic Acid
ttccaaagggctagctacaacgatttcagct

SEQ ID NO: 19809 - DNA, 31 bp, Artificial Sequence
  Description of Artificial Sequence:  Enzymatic Nucleic Acid
tggttctgggctagctacaacgacttccaaa

SEQ ID NO: 19810 - DNA, 31 bp, Artificial Sequence
  Description of Artificial Sequence:  Enzymatic Nucleic Acid
taatttggggctagctacaacgatctgtctt

SEQ ID NO: 19811 - DNA, 31 bp, Artificial Sequence
  Description of Artificial Sequence:  Enzymatic Nucleic Acid
ggagataaggctagctacaacgattggttct

SEQ ID NO: 19812 - DNA, 31 bp, Artificial Sequence
  Description of Artificial Sequence:  Enzymatic Nucleic Acid
gatggagaggctagctacaacgaaatttggt

SEQ ID NO: 19813 - DNA, 31 bp, Artificial Sequence
  Description of Artificial Sequence:  Enzymatic Nucleic Acid
ccaaaagaggctagctacaacgaggagataa

SEQ ID NO: 19814 - DNA, 31 bp, Artificial Sequence
  Description of Artificial Sequence:  Enzymatic Nucleic Acid
ccattccaggctagctacaacgacaaaagat

SEQ ID NO: 19815 - DNA, 31 bp, Artificial Sequence
  Description of Artificial Sequence:  Enzymatic Nucleic Acid
gggcaccaggctagctacaacgatccaccaa

SEQ ID NO: 19816 - DNA, 31 bp, Artificial Sequence
  Description of Artificial Sequence:  Enzymatic Nucleic Acid
gctgggcaggctagctacaacgacattccac

SEQ ID NO: 19817 - DNA, 31 bp, Artificial Sequence
  Description of Artificial Sequence:  Enzymatic Nucleic Acid
ttgctgggggctagctacaacgaaccattcc

SEQ ID NO: 19818 - DNA, 31 bp, Artificial Sequence
  Description of Artificial Sequence:  Enzymatic Nucleic Acid
tgcttttgggctagctacaacgatgggcacc

SEQ ID NO: 19819 - DNA, 31 bp, Artificial Sequence
  Description of Artificial Sequence:  Enzymatic Nucleic Acid
actccctgggctagctacaacgattttgctg

SEQ ID NO: 19820 - DNA, 31 bp, Artificial Sequence
  Description of Artificial Sequence:  Enzymatic Nucleic Acid
gccacagaggctagctacaacgatccctgct

SEQ ID NO: 19821 - DNA, 31 bp, Artificial Sequence
  Description of Artificial Sequence:  Enzymatic Nucleic Acid
agatgccaggctagctacaacgaagactccc

SEQ ID NO: 19822 - DNA, 31 bp, Artificial Sequence
  Description of Artificial Sequence:  Enzymatic Nucleic Acid
ttcagatgggctagctacaacgacacagact

SEQ ID NO: 19823 - DNA, 31 bp, Artificial Sequence
  Description of Artificial Sequence:  Enzymatic Nucleic Acid
ccttcagaggctagctacaacgagccacaga

SEQ ID NO: 19824 - DNA, 31 bp, Artificial Sequence
  Description of Artificial Sequence:  Enzymatic Nucleic Acid
ggtttgagggctagctacaacgacttcagat

SEQ ID NO: 19825 - DNA, 31 bp, Artificial Sequence
  Description of Artificial Sequence:  Enzymatic Nucleic Acid
ttgtctggggctagctacaacgattgagcct

SEQ ID NO: 19826 - DNA, 31 bp, Artificial Sequence
  Description of Artificial Sequence:  Enzymatic Nucleic Acid
gccgcttgggctagctacaacgactggtttg

SEQ ID NO: 19827 - DNA, 31 bp, Artificial Sequence
  Description of Artificial Sequence:  Enzymatic Nucleic Acid
ggtagccgggctagctacaacgattgtctgg

SEQ ID NO: 19828 - DNA, 31 bp, Artificial Sequence
  Description of Artificial Sequence:  Enzymatic Nucleic Acid
actggtagggctagctacaacgacgcttgtc

SEQ ID NO: 19829 - DNA, 31 bp, Artificial Sequence
  Description of Artificial Sequence:  Enzymatic Nucleic Acid
cggactggggctagctacaacgaagccgctt

SEQ ID NO: 19830 - DNA, 31 bp, Artificial Sequence
  Description of Artificial Sequence:  Enzymatic Nucleic Acid
tatccggaggctagctacaacgatggtagcc

SEQ ID NO: 19831 - DNA, 31 bp, Artificial Sequence
  Description of Artificial Sequence:  Enzymatic Nucleic Acid
gagtgataggctagctacaacgaccggactg

SEQ ID NO: 19832 - DNA, 31 bp, Artificial Sequence
  Description of Artificial Sequence:  Enzymatic Nucleic Acid
cggagtgaggctagctacaacgaatccggac

SEQ ID NO: 19833 - DNA, 31 bp, Artificial Sequence
  Description of Artificial Sequence:  Enzymatic Nucleic Acid
catcggagggctagctacaacgagatatccg

SEQ ID NO: 19834 - DNA, 31 bp, Artificial Sequence
  Description of Artificial Sequence:  Enzymatic Nucleic Acid
ctgtgtcaggctagctacaacgacggagtga

SEQ ID NO: 19835 - DNA, 31 bp, Artificial Sequence
  Description of Artificial Sequence:  Enzymatic Nucleic Acid
tgtctgtgggctagctacaacgacatcggag

SEQ ID NO: 19836 - DNA, 31 bp, Artificial Sequence
  Description of Artificial Sequence:  Enzymatic Nucleic Acid
ggtgtctgggctagctacaacgagtcatcgg

SEQ ID NO: 19837 - DNA, 31 bp, Artificial Sequence
  Description of Artificial Sequence:  Enzymatic Nucleic Acid
cggtggtgggctagctacaacgactgtgtca

SEQ ID NO: 19838 - DNA, 31 bp, Artificial Sequence
  Description of Artificial Sequence:  Enzymatic Nucleic Acid
cacggtggggctagctacaacgagtctgtgt

SEQ ID NO: 19839 - DNA, 31 bp, Artificial Sequence
  Description of Artificial Sequence:  Enzymatic Nucleic Acid
gtacacggggctagctacaacgaggtgtctg

SEQ ID NO: 19840 - DNA, 31 bp, Artificial Sequence
  Description of Artificial Sequence:  Enzymatic Nucleic Acid
ggagtacaggctagctacaacgaggtggtgt

SEQ ID NO: 19841 - DNA, 31 bp, Artificial Sequence
  Description of Artificial Sequence:  Enzymatic Nucleic Acid
ctggagtaggctagctacaacgaacggtggt

SEQ ID NO: 19842 - DNA, 31 bp, Artificial Sequence
  Description of Artificial Sequence:  Enzymatic Nucleic Acid
cactggagggctagctacaacgaacacggtg

SEQ ID NO: 19843 - DNA, 31 bp, Artificial Sequence
  Description of Artificial Sequence:  Enzymatic Nucleic Acid
cttcctcaggctagctacaacgatggagtac

SEQ ID NO: 19844 - DNA, 31 bp, Artificial Sequence
  Description of Artificial Sequence:  Enzymatic Nucleic Acid
aagttctgggctagctacaacgattcctcac

SEQ ID NO: 19845 - DNA, 31 bp, Artificial Sequence
  Description of Artificial Sequence:  Enzymatic Nucleic Acid
tttaaaagggctagctacaacgatctgcttc

SEQ ID NO: 19846 - DNA, 31 bp, Artificial Sequence
  Description of Artificial Sequence:  Enzymatic Nucleic Acid
tctatcagggctagctacaacgatttaaaag

SEQ ID NO: 19847 - DNA, 31 bp, Artificial Sequence
  Description of Artificial Sequence:  Enzymatic Nucleic Acid
aatctctaggctagctacaacgacagcttta

SEQ ID NO: 19848 - DNA, 31 bp, Artificial Sequence
  Description of Artificial Sequence:  Enzymatic Nucleic Acid
cactccaaggctagctacaacgactctatca

SEQ ID NO: 19849 - DNA, 31 bp, Artificial Sequence
  Description of Artificial Sequence:  Enzymatic Nucleic Acid
ggtttgcaggctagctacaacgatccaatct

SEQ ID NO: 19850 - DNA, 31 bp, Artificial Sequence
  Description of Artificial Sequence:  Enzymatic Nucleic Acid
ccggtttgggctagctacaacgaactccaat

SEQ ID NO: 19851 - DNA, 31 bp, Artificial Sequence
  Description of Artificial Sequence:  Enzymatic Nucleic Acid
gctaccggggctagctacaacgattgcactc

SEQ ID NO: 19852 - DNA, 31 bp, Artificial Sequence
  Description of Artificial Sequence:  Enzymatic Nucleic Acid
ctgtgctaggctagctacaacgacggtttgc

SEQ ID NO: 19853 - DNA, 31 bp, Artificial Sequence
  Description of Artificial Sequence:  Enzymatic Nucleic Acid
gggctgtgggctagctacaacgataccggtt

SEQ ID NO: 19854 - DNA, 31 bp, Artificial Sequence
  Description of Artificial Sequence:  Enzymatic Nucleic Acid
ctgggctgggctagctacaacgagctaccgg

SEQ ID NO: 19855 - DNA, 31 bp, Artificial Sequence
  Description of Artificial Sequence:  Enzymatic Nucleic Acid
aatctgggggctagctacaacgatgtgctac

SEQ ID NO: 19856 - DNA, 31 bp, Artificial Sequence
  Description of Artificial Sequence:  Enzymatic Nucleic Acid
ctggagaaggctagctacaacgactgggctg

SEQ ID NO: 19857 - DNA, 31 bp, Artificial Sequence
  Description of Artificial Sequence:  Enzymatic Nucleic Acid
gagtcaggggctagctacaacgatggagaat

SEQ ID NO: 19858 - DNA, 31 bp, Artificial Sequence
  Description of Artificial Sequence:  Enzymatic Nucleic Acid
tccccgagggctagctacaacgacaggctgg

SEQ ID NO: 19859 - DNA, 31 bp, Artificial Sequence
  Description of Artificial Sequence:  Enzymatic Nucleic Acid
cagtgtggggctagctacaacgaccccgagt

SEQ ID NO: 19860 - DNA, 31 bp, Artificial Sequence
  Description of Artificial Sequence:  Enzymatic Nucleic Acid
gctcagtgggctagctacaacgaggtccccg

SEQ ID NO: 19861 - DNA, 31 bp, Artificial Sequence
  Description of Artificial Sequence:  Enzymatic Nucleic Acid
gagctcagggctagctacaacgagtggtccc

SEQ ID NO: 19862 - DNA, 31 bp, Artificial Sequence
  Description of Artificial Sequence:  Enzymatic Nucleic Acid
gaggagagggctagctacaacgatcagtgtg

SEQ ID NO: 19863 - DNA, 31 bp, Artificial Sequence
  Description of Artificial Sequence:  Enzymatic Nucleic Acid
cttttaaaggctagctacaacgaaggaggag

SEQ ID NO: 19864 - DNA, 31 bp, Artificial Sequence
  Description of Artificial Sequence:  Enzymatic Nucleic Acid
tgtggatgggctagctacaacgattcctttt

SEQ ID NO: 19865 - DNA, 31 bp, Artificial Sequence
  Description of Artificial Sequence:  Enzymatic Nucleic Acid
ggtgtggaggctagctacaacgagcttcctt

SEQ ID NO: 19866 - DNA, 31 bp, Artificial Sequence
  Description of Artificial Sequence:  Enzymatic Nucleic Acid
ttggggtgggctagctacaacgaggatgctt

SEQ ID NO: 19867 - DNA, 31 bp, Artificial Sequence
  Description of Artificial Sequence:  Enzymatic Nucleic Acid
agttggggggctagctacaacgagtggatgc

SEQ ID NO: 19868 - DNA, 31 bp, Artificial Sequence
  Description of Artificial Sequence:  Enzymatic Nucleic Acid
tccgggagggctagctacaacgatggggtgt

SEQ ID NO: 19869 - DNA, 31 bp, Artificial Sequence
  Description of Artificial Sequence:  Enzymatic Nucleic Acid
atgtgatgggctagctacaacgaccgggagt

SEQ ID NO: 19870 - DNA, 31 bp, Artificial Sequence
  Description of Artificial Sequence:  Enzymatic Nucleic Acid
tcatgtgaggctagctacaacgagtccggga

SEQ ID NO: 19871 - DNA, 31 bp, Artificial Sequence
  Description of Artificial Sequence:  Enzymatic Nucleic Acid
ctctcatgggctagctacaacgagatgtccg

SEQ ID NO: 19872 - DNA, 31 bp, Artificial Sequence
  Description of Artificial Sequence:  Enzymatic Nucleic Acid
acctctcaggctagctacaacgagtgatgtc

SEQ ID NO: 19873 - DNA, 31 bp, Artificial Sequence
  Description of Artificial Sequence:  Enzymatic Nucleic Acid
tgagcagaggctagctacaacgactctcatg

SEQ ID NO: 19874 - DNA, 31 bp, Artificial Sequence
  Description of Artificial Sequence:  Enzymatic Nucleic Acid
aatctgagggctagctacaacgaagacctct

SEQ ID NO: 19875 - DNA, 31 bp, Artificial Sequence
  Description of Artificial Sequence:  Enzymatic Nucleic Acid
cttcaaaaggctagctacaacgactgagcag

SEQ ID NO: 19876 - DNA, 31 bp, Artificial Sequence
  Description of Artificial Sequence:  Enzymatic Nucleic Acid
gaacaacaggctagctacaacgattcaaaat

SEQ ID NO: 19877 - DNA, 31 bp, Artificial Sequence
  Description of Artificial Sequence:  Enzymatic Nucleic Acid
aagaacaaggctagctacaacgaacttcaaa

SEQ ID NO: 19878 - DNA, 31 bp, Artificial Sequence
  Description of Artificial Sequence:  Enzymatic Nucleic Acid
ggaaagaaggctagctacaacgaaacacttc

SEQ ID NO: 19879 - DNA, 31 bp, Artificial Sequence
  Description of Artificial Sequence:  Enzymatic Nucleic Acid
cctgctggggctagctacaacgaggaaagaa

SEQ ID NO: 19880 - DNA, 31 bp, Artificial Sequence
  Description of Artificial Sequence:  Enzymatic Nucleic Acid
acttcctgggctagctacaacgatggtggaa

SEQ ID NO: 19881 - DNA, 31 bp, Artificial Sequence
  Description of Artificial Sequence:  Enzymatic Nucleic Acid
tgcggctaggctagctacaacgattcctgct

SEQ ID NO: 19882 - DNA, 31 bp, Artificial Sequence
  Description of Artificial Sequence:  Enzymatic Nucleic Acid
aaatgcggggctagctacaacgatacttcct

SEQ ID NO: 19883 - DNA, 31 bp, Artificial Sequence
  Description of Artificial Sequence:  Enzymatic Nucleic Acid
atcaaatgggctagctacaacgaggctactt

SEQ ID NO: 19884 - DNA, 31 bp, Artificial Sequence
  Description of Artificial Sequence:  Enzymatic Nucleic Acid
aaatcaaaggctagctacaacgagcggctac

SEQ ID NO: 19885 - DNA, 31 bp, Artificial Sequence
  Description of Artificial Sequence:  Enzymatic Nucleic Acid
aatgaaaaggctagctacaacgacaaatgcg

SEQ ID NO: 19886 - DNA, 31 bp, Artificial Sequence
  Description of Artificial Sequence:  Enzymatic Nucleic Acid
tgtcgaaaggctagctacaacgagaaaatca

SEQ ID NO: 19887 - DNA, 31 bp, Artificial Sequence
  Description of Artificial Sequence:  Enzymatic Nucleic Acid
ttctgttgggctagctacaacgacgaaatga

SEQ ID NO: 19888 - DNA, 31 bp, Artificial Sequence
  Description of Artificial Sequence:  Enzymatic Nucleic Acid
tttttctgggctagctacaacgatgtcgaaa

SEQ ID NO: 19889 - DNA, 31 bp, Artificial Sequence
  Description of Artificial Sequence:  Enzymatic Nucleic Acid
gtccgaggggctagctacaacgacctttttc

SEQ ID NO: 19890 - DNA, 31 bp, Artificial Sequence
  Description of Artificial Sequence:  Enzymatic Nucleic Acid
ccctgcagggctagctacaacgaccgaggtc

SEQ ID NO: 19891 - DNA, 31 bp, Artificial Sequence
  Description of Artificial Sequence:  Enzymatic Nucleic Acid
gctccctgggctagctacaacgaagtccgag

SEQ ID NO: 19892 - DNA, 31 bp, Artificial Sequence
  Description of Artificial Sequence:  Enzymatic Nucleic Acid
aagactggggctagctacaacgatccctgca

SEQ ID NO: 19893 - DNA, 31 bp, Artificial Sequence
  Description of Artificial Sequence:  Enzymatic Nucleic Acid
ctagaagaggctagctacaacgatggctccc

SEQ ID NO: 19894 - DNA, 31 bp, Artificial Sequence
  Description of Artificial Sequence:  Enzymatic Nucleic Acid
aggatatgggctagctacaacgactagaaga

SEQ ID NO: 19895 - DNA, 31 bp, Artificial Sequence
  Description of Artificial Sequence:  Enzymatic Nucleic Acid
ccaggataggctagctacaacgagcctagaa

SEQ ID NO: 19896 - DNA, 31 bp, Artificial Sequence
  Description of Artificial Sequence:  Enzymatic Nucleic Acid
ttccaggaggctagctacaacgaatgcctag

SEQ ID NO: 19897 - DNA, 31 bp, Artificial Sequence
  Description of Artificial Sequence:  Enzymatic Nucleic Acid
gtcacaagggctagctacaacgactcttcca

SEQ ID NO: 19898 - DNA, 31 bp, Artificial Sequence
  Description of Artificial Sequence:  Enzymatic Nucleic Acid
ttgggtcaggctagctacaacgaaagcctct

SEQ ID NO: 19899 - DNA, 31 bp, Artificial Sequence
  Description of Artificial Sequence:  Enzymatic Nucleic Acid
ttcttgggggctagctacaacgacacaagcc

SEQ ID NO: 19900 - DNA, 31 bp, Artificial Sequence
  Description of Artificial Sequence:  Enzymatic Nucleic Acid
cagacacaggctagctacaacgatcttgggt

SEQ ID NO: 19901 - DNA, 31 bp, Artificial Sequence
  Description of Artificial Sequence:  Enzymatic Nucleic Acid
cacagacaggctagctacaacgaattcttgg

SEQ ID NO: 19902 - DNA, 31 bp, Artificial Sequence
  Description of Artificial Sequence:  Enzymatic Nucleic Acid
gacacagaggctagctacaacgaacattctt

SEQ ID NO: 19903 - DNA, 31 bp, Artificial Sequence
  Description of Artificial Sequence:  Enzymatic Nucleic Acid
agaagacaggctagctacaacgaagacacat

SEQ ID NO: 19904 - DNA, 31 bp, Artificial Sequence
  Description of Artificial Sequence:  Enzymatic Nucleic Acid
ggagaagaggctagctacaacgaacagacac

SEQ ID NO: 19905 - DNA, 31 bp, Artificial Sequence
  Description of Artificial Sequence:  Enzymatic Nucleic Acid
ggtcaacaggctagctacaacgatgggagaa

SEQ ID NO: 19906 - DNA, 31 bp, Artificial Sequence
  Description of Artificial Sequence:  Enzymatic Nucleic Acid
caggtcaaggctagctacaacgaactgggag

SEQ ID NO: 19907 - DNA, 31 bp, Artificial Sequence
  Description of Artificial Sequence:  Enzymatic Nucleic Acid
ggatcaggggctagctacaacgacaacactg

SEQ ID NO: 19908 - DNA, 31 bp, Artificial Sequence
  Description of Artificial Sequence:  Enzymatic Nucleic Acid
aaagaggaggctagctacaacgacaggtcaa

SEQ ID NO: 19909 - DNA, 31 bp, Artificial Sequence
  Description of Artificial Sequence:  Enzymatic Nucleic Acid
taaatgaaggctagctacaacgagaaaaaag

SEQ ID NO: 19910 - DNA, 31 bp, Artificial Sequence
  Description of Artificial Sequence:  Enzymatic Nucleic Acid
tttttaaaggctagctacaacgagaatgaaa

SEQ ID NO: 19911 - DNA, 31 bp, Artificial Sequence
  Description of Artificial Sequence:  Enzymatic Nucleic Acid
tgataatgggctagctacaacgatttttaaa

SEQ ID NO: 19912 - DNA, 31 bp, Artificial Sequence
  Description of Artificial Sequence:  Enzymatic Nucleic Acid
catgataaggctagctacaacgagcttttta

SEQ ID NO: 19913 - DNA, 31 bp, Artificial Sequence
  Description of Artificial Sequence:  Enzymatic Nucleic Acid
gggcatgaggctagctacaacgaaatgcttt

SEQ ID NO: 19914 - DNA, 31 bp, Artificial Sequence
  Description of Artificial Sequence:  Enzymatic Nucleic Acid
caggggcaggctagctacaacgagataatgc

SEQ ID NO: 19915 - DNA, 31 bp, Artificial Sequence
  Description of Artificial Sequence:  Enzymatic Nucleic Acid
agcaggggggctagctacaacgaatgataat

SEQ ID NO: 19916 - DNA, 31 bp, Artificial Sequence
  Description of Artificial Sequence:  Enzymatic Nucleic Acid
acccgcagggctagctacaacgaaggggcat

SEQ ID NO: 19917 - DNA, 31 bp, Artificial Sequence
  Description of Artificial Sequence:  Enzymatic Nucleic Acid
gagacccgggctagctacaacgaagcagggg

SEQ ID NO: 19918 - DNA, 31 bp, Artificial Sequence
  Description of Artificial Sequence:  Enzymatic Nucleic Acid
tggtgagaggctagctacaacgaccgcagca

SEQ ID NO: 19919 - DNA, 31 bp, Artificial Sequence
  Description of Artificial Sequence:  Enzymatic Nucleic Acid
acccatggggctagctacaacgagagacccg

SEQ ID NO: 19920 - DNA, 31 bp, Artificial Sequence
  Description of Artificial Sequence:  Enzymatic Nucleic Acid
taaacccaggctagctacaacgaggtgagac

SEQ ID NO: 19921 - DNA, 31 bp, Artificial Sequence
  Description of Artificial Sequence:  Enzymatic Nucleic Acid
gttctaaaggctagctacaacgaccatggtg

SEQ ID NO: 19922 - DNA, 31 bp, Artificial Sequence
  Description of Artificial Sequence:  Enzymatic Nucleic Acid
gctctttgggctagctacaacgatctaaacc

SEQ ID NO: 19923 - DNA, 31 bp, Artificial Sequence
  Description of Artificial Sequence:  Enzymatic Nucleic Acid
gcttgaagggctagctacaacgatctttgtt

SEQ ID NO: 19924 - DNA, 31 bp, Artificial Sequence
  Description of Artificial Sequence:  Enzymatic Nucleic Acid
ggccattgggctagctacaacgattgaagct

SEQ ID NO: 19925 - DNA, 31 bp, Artificial Sequence
  Description of Artificial Sequence:  Enzymatic Nucleic Acid
tggggccaggctagctacaacgatgcttgaa

SEQ ID NO: 19926 - DNA, 31 bp, Artificial Sequence
  Description of Artificial Sequence:  Enzymatic Nucleic Acid
ggatggggggctagctacaacgacattgctt

SEQ ID NO: 19927 - DNA, 31 bp, Artificial Sequence
  Description of Artificial Sequence:  Enzymatic Nucleic Acid
tttgaggaggctagctacaacgaggggccat

SEQ ID NO: 19928 - DNA, 31 bp, Artificial Sequence
  Description of Artificial Sequence:  Enzymatic Nucleic Acid
tactgctaggctagctacaacgattctttga

SEQ ID NO: 19929 - DNA, 31 bp, Artificial Sequence
  Description of Artificial Sequence:  Enzymatic Nucleic Acid
aggtactgggctagctacaacgatacttctt

SEQ ID NO: 19930 - DNA, 31 bp, Artificial Sequence
  Description of Artificial Sequence:  Enzymatic Nucleic Acid
cccaggtaggctagctacaacgatgctactt

SEQ ID NO: 19931 - DNA, 31 bp, Artificial Sequence
  Description of Artificial Sequence:  Enzymatic Nucleic Acid
tccccaggggctagctacaacgaactgctac

SEQ ID NO: 19932 - DNA, 31 bp, Artificial Sequence
  Description of Artificial Sequence:  Enzymatic Nucleic Acid
agtgtcagggctagctacaacgatccccagg

SEQ ID NO: 19933 - DNA, 31 bp, Artificial Sequence
  Description of Artificial Sequence:  Enzymatic Nucleic Acid
cagaagtgggctagctacaacgacagctccc

SEQ ID NO: 19934 - DNA, 31 bp, Artificial Sequence
  Description of Artificial Sequence:  Enzymatic Nucleic Acid
tacagaagggctagctacaacgagtcagctc

SEQ ID NO: 19935 - DNA, 31 bp, Artificial Sequence
  Description of Artificial Sequence:  Enzymatic Nucleic Acid
tagttttaggctagctacaacgaagaagtgt

SEQ ID NO: 19936 - DNA, 31 bp, Artificial Sequence
  Description of Artificial Sequence:  Enzymatic Nucleic Acid
tcttctagggctagctacaacgatttacaga

SEQ ID NO: 19937 - DNA, 31 bp, Artificial Sequence
  Description of Artificial Sequence:  Enzymatic Nucleic Acid
ctggtttaggctagctacaacgacttctagt

SEQ ID NO: 19938 - DNA, 31 bp, Artificial Sequence
  Description of Artificial Sequence:  Enzymatic Nucleic Acid
ttgcctggggctagctacaacgattatcttc

SEQ ID NO: 19939 - DNA, 31 bp, Artificial Sequence
  Description of Artificial Sequence:  Enzymatic Nucleic Acid
ttacgttgggctagctacaacgactggttta

SEQ ID NO: 19940 - DNA, 31 bp, Artificial Sequence
  Description of Artificial Sequence:  Enzymatic Nucleic Acid
cacttacgggctagctacaacgatgcctggt

SEQ ID NO: 19941 - DNA, 31 bp, Artificial Sequence
  Description of Artificial Sequence:  Enzymatic Nucleic Acid
aacacttaggctagctacaacgagttgcctg

SEQ ID NO: 19942 - DNA, 31 bp, Artificial Sequence
  Description of Artificial Sequence:  Enzymatic Nucleic Acid
ctcgaacaggctagctacaacgattacgttg

SEQ ID NO: 19943 - DNA, 31 bp, Artificial Sequence
  Description of Artificial Sequence:  Enzymatic Nucleic Acid
acctcgaaggctagctacaacgaacttacgt

SEQ ID NO: 19944 - DNA, 31 bp, Artificial Sequence
  Description of Artificial Sequence:  Enzymatic Nucleic Acid
cttcaacaggctagctacaacgactcgaaca

SEQ ID NO: 19945 - DNA, 31 bp, Artificial Sequence
  Description of Artificial Sequence:  Enzymatic Nucleic Acid
atcttcaaggctagctacaacgaacctcgaa

SEQ ID NO: 19946 - DNA, 31 bp, Artificial Sequence
  Description of Artificial Sequence:  Enzymatic Nucleic Acid
ccttcccaggctagctacaacgacttcaaca

SEQ ID NO: 19947 - DNA, 31 bp, Artificial Sequence
  Description of Artificial Sequence:  Enzymatic Nucleic Acid
cctgcaaaggctagctacaacgaccttccca

SEQ ID NO: 19948 - DNA, 31 bp, Artificial Sequence
  Description of Artificial Sequence:  Enzymatic Nucleic Acid
cagccctgggctagctacaacgaaaatcctt

SEQ ID NO: 19949 - DNA, 31 bp, Artificial Sequence
  Description of Artificial Sequence:  Enzymatic Nucleic Acid
agactcagggctagctacaacgacctgcaaa

SEQ ID NO: 19950 - DNA, 31 bp, Artificial Sequence
  Description of Artificial Sequence:  Enzymatic Nucleic Acid
tggatagaggctagctacaacgatcagccct

SEQ ID NO: 19951 - DNA, 31 bp, Artificial Sequence
  Description of Artificial Sequence:  Enzymatic Nucleic Acid
ctcttggaggctagctacaacgaagactcag

SEQ ID NO: 19952 - DNA, 31 bp, Artificial Sequence
  Description of Artificial Sequence:  Enzymatic Nucleic Acid
aaacaaagggctagctacaacgactcttgga

SEQ ID NO: 19953 - DNA, 31 bp, Artificial Sequence
  Description of Artificial Sequence:  Enzymatic Nucleic Acid
gtcctaaaggctagctacaacgaaaagcctc

SEQ ID NO: 19954 - DNA, 31 bp, Artificial Sequence
  Description of Artificial Sequence:  Enzymatic Nucleic Acid
gacccacgggctagctacaacgacctaaaca

SEQ ID NO: 19955 - DNA, 31 bp, Artificial Sequence
  Description of Artificial Sequence:  Enzymatic Nucleic Acid
gggacccaggctagctacaacgagtcctaaa

SEQ ID NO: 19956 - DNA, 31 bp, Artificial Sequence
  Description of Artificial Sequence:  Enzymatic Nucleic Acid
gcttgggaggctagctacaacgaccacgtcc

SEQ ID NO: 19957 - DNA, 31 bp, Artificial Sequence
  Description of Artificial Sequence:  Enzymatic Nucleic Acid
aggcttggggctagctacaacgattgggacc

SEQ ID NO: 19958 - DNA, 31 bp, Artificial Sequence
  Description of Artificial Sequence:  Enzymatic Nucleic Acid
acttaaggggctagctacaacgattggcttg

SEQ ID NO: 19959 - DNA, 31 bp, Artificial Sequence
  Description of Artificial Sequence:  Enzymatic Nucleic Acid
attccacaggctagctacaacgattaaggct

SEQ ID NO: 19960 - DNA, 31 bp, Artificial Sequence
  Description of Artificial Sequence:  Enzymatic Nucleic Acid
gaattccaggctagctacaacgaacttaagg

SEQ ID NO: 19961 - DNA, 31 bp, Artificial Sequence
  Description of Artificial Sequence:  Enzymatic Nucleic Acid
aatccgaaggctagctacaacgatccacact

SEQ ID NO: 19962 - DNA, 31 bp, Artificial Sequence
  Description of Artificial Sequence:  Enzymatic Nucleic Acid
tctatcaaggctagctacaacgaccgaattc

SEQ ID NO: 19963 - DNA, 31 bp, Artificial Sequence
  Description of Artificial Sequence:  Enzymatic Nucleic Acid
cctttctaggctagctacaacgacaatccga

SEQ ID NO: 19964 - DNA, 31 bp, Artificial Sequence
  Description of Artificial Sequence:  Enzymatic Nucleic Acid
aacgttagggctagctacaacgacttccttt

SEQ ID NO: 19965 - DNA, 31 bp, Artificial Sequence
  Description of Artificial Sequence:  Enzymatic Nucleic Acid
aggtaacgggctagctacaacgatagtcttc

SEQ ID NO: 19966 - DNA, 31 bp, Artificial Sequence
  Description of Artificial Sequence:  Enzymatic Nucleic Acid
caaggtaaggctagctacaacgagttagtct

SEQ ID NO: 19967 - DNA, 31 bp, Artificial Sequence
  Description of Artificial Sequence:  Enzymatic Nucleic Acid
aagcaaggggctagctacaacgaaacgttag

SEQ ID NO: 19968 - DNA, 31 bp, Artificial Sequence
  Description of Artificial Sequence:  Enzymatic Nucleic Acid
ctccaaagggctagctacaacgaaaggtaac

SEQ ID NO: 19969 - DNA, 31 bp, Artificial Sequence
  Description of Artificial Sequence:  Enzymatic Nucleic Acid
ctccagtaggctagctacaacgatctccaaa

SEQ ID NO: 19970 - DNA, 31 bp, Artificial Sequence
  Description of Artificial Sequence:  Enzymatic Nucleic Acid
ggctccagggctagctacaacgaactctcca

SEQ ID NO: 19971 - DNA, 31 bp, Artificial Sequence
  Description of Artificial Sequence:  Enzymatic Nucleic Acid
tttgcaggggctagctacaacgatccagtac

SEQ ID NO: 19972 - DNA, 31 bp, Artificial Sequence
  Description of Artificial Sequence:  Enzymatic Nucleic Acid
tgcatttgggctagctacaacgaaggctcca

SEQ ID NO: 19973 - DNA, 31 bp, Artificial Sequence
  Description of Artificial Sequence:  Enzymatic Nucleic Acid
acaatgcaggctagctacaacgattgcaggc

SEQ ID NO: 19974 - DNA, 31 bp, Artificial Sequence
  Description of Artificial Sequence:  Enzymatic Nucleic Acid
acacaatgggctagctacaacgaatttgcag

SEQ ID NO: 19975 - DNA, 31 bp, Artificial Sequence
  Description of Artificial Sequence:  Enzymatic Nucleic Acid
aaacacaaggctagctacaacgagcatttgc

SEQ ID NO: 19976 - DNA, 31 bp, Artificial Sequence
  Description of Artificial Sequence:  Enzymatic Nucleic Acid
agcaaacaggctagctacaacgaaatgcatt

SEQ ID NO: 19977 - DNA, 31 bp, Artificial Sequence
  Description of Artificial Sequence:  Enzymatic Nucleic Acid
agagcaaaggctagctacaacgaacaatgca

SEQ ID NO: 19978 - DNA, 31 bp, Artificial Sequence
  Description of Artificial Sequence:  Enzymatic Nucleic Acid
caccagagggctagctacaacgaaaacacaa

SEQ ID NO: 19979 - DNA, 31 bp, Artificial Sequence
  Description of Artificial Sequence:  Enzymatic Nucleic Acid
cacctccaggctagctacaacgacagagcaa

SEQ ID NO: 19980 - DNA, 31 bp, Artificial Sequence
  Description of Artificial Sequence:  Enzymatic Nucleic Acid
catgcccaggctagctacaacgactccacca

SEQ ID NO: 19981 - DNA, 31 bp, Artificial Sequence
  Description of Artificial Sequence:  Enzymatic Nucleic Acid
accccatgggctagctacaacgaccacctcc

SEQ ID NO: 19982 - DNA, 31 bp, Artificial Sequence
  Description of Artificial Sequence:  Enzymatic Nucleic Acid
agaccccaggctagctacaacgagcccacct

SEQ ID NO: 19983 - DNA, 31 bp, Artificial Sequence
  Description of Artificial Sequence:  Enzymatic Nucleic Acid
agaacagaggctagctacaacgacccatgcc

SEQ ID NO: 19984 - DNA, 31 bp, Artificial Sequence
  Description of Artificial Sequence:  Enzymatic Nucleic Acid
tttcagaaggctagctacaacgaagacccca

SEQ ID NO: 19985 - DNA, 31 bp, Artificial Sequence
  Description of Artificial Sequence:  Enzymatic Nucleic Acid
cctttacaggctagctacaacgattcagaac

SEQ ID NO: 19986 - DNA, 31 bp, Artificial Sequence
  Description of Artificial Sequence:  Enzymatic Nucleic Acid
accctttaggctagctacaacgaatttcaga

SEQ ID NO: 19987 - DNA, 31 bp, Artificial Sequence
  Description of Artificial Sequence:  Enzymatic Nucleic Acid
cgtctgaaggctagctacaacgacctttaca

SEQ ID NO: 19988 - DNA, 31 bp, Artificial Sequence
  Description of Artificial Sequence:  Enzymatic Nucleic Acid
aaaccccgggctagctacaacgactgaaccc

SEQ ID NO: 19989 - DNA, 31 bp, Artificial Sequence
  Description of Artificial Sequence:  Enzymatic Nucleic Acid
accagaaaggctagctacaacgacccgtctg

SEQ ID NO: 19990 - DNA, 31 bp, Artificial Sequence
  Description of Artificial Sequence:  Enzymatic Nucleic Acid
ttctaaaaggctagctacaacgacagaaacc

SEQ ID NO: 19991 - DNA, 31 bp, Artificial Sequence
  Description of Artificial Sequence:  Enzymatic Nucleic Acid
acacgcaaggctagctacaacgacttctaaa

SEQ ID NO: 19992 - DNA, 31 bp, Artificial Sequence
  Description of Artificial Sequence:  Enzymatic Nucleic Acid
agaacacgggctagctacaacgaaaccttct

SEQ ID NO: 19993 - DNA, 31 bp, Artificial Sequence
  Description of Artificial Sequence:  Enzymatic Nucleic Acid
gaagaacaggctagctacaacgagcaacctt

SEQ ID NO: 19994 - DNA, 31 bp, Artificial Sequence
  Description of Artificial Sequence:  Enzymatic Nucleic Acid
tcgaagaaggctagctacaacgaacgcaacc

SEQ ID NO: 19995 - DNA, 31 bp, Artificial Sequence
  Description of Artificial Sequence:  Enzymatic Nucleic Acid
tagcccaaggctagctacaacgatcgaagaa

SEQ ID NO: 19996 - DNA, 31 bp, Artificial Sequence
  Description of Artificial Sequence:  Enzymatic Nucleic Acid
tactttagggctagctacaacgaccaactcg

SEQ ID NO: 19997 - DNA, 31 bp, Artificial Sequence
  Description of Artificial Sequence:  Enzymatic Nucleic Acid
gaactctaggctagctacaacgatttagccc

SEQ ID NO: 19998 - DNA, 31 bp, Artificial Sequence
  Description of Artificial Sequence:  Enzymatic Nucleic Acid
acaacgaaggctagctacaacgatctacttt

SEQ ID NO: 19999 - DNA, 31 bp, Artificial Sequence
  Description of Artificial Sequence:  Enzymatic Nucleic Acid
cagcacaaggctagctacaacgagaactcta

SEQ ID NO: 20000 - DNA, 31 bp, Artificial Sequence
  Description of Artificial Sequence:  Enzymatic Nucleic Acid
aaacagcaggctagctacaacgaaacgaact

SEQ ID NO: 20001 - DNA, 31 bp, Artificial Sequence
  Description of Artificial Sequence:  Enzymatic Nucleic Acid
agaaacagggctagctacaacgaacaacgaa

SEQ ID NO: 20002 - DNA, 31 bp, Artificial Sequence
  Description of Artificial Sequence:  Enzymatic Nucleic Acid
gtcagaaaggctagctacaacgaagcacaac

SEQ ID NO: 20003 - DNA, 31 bp, Artificial Sequence
  Description of Artificial Sequence:  Enzymatic Nucleic Acid
attaggagggctagctacaacgacagaaaca

SEQ ID NO: 20004 - DNA, 31 bp, Artificial Sequence
  Description of Artificial Sequence:  Enzymatic Nucleic Acid
aactctcaggctagctacaacgataggagtc

SEQ ID NO: 20005 - DNA, 31 bp, Artificial Sequence
  Description of Artificial Sequence:  Enzymatic Nucleic Acid
ggaaggaaggctagctacaacgatctcatta

SEQ ID NO: 20006 - DNA, 31 bp, Artificial Sequence
  Description of Artificial Sequence:  Enzymatic Nucleic Acid
gctaacggggctagctacaacgactggaagg

SEQ ID NO: 20007 - DNA, 31 bp, Artificial Sequence
  Description of Artificial Sequence:  Enzymatic Nucleic Acid
acagctaaggctagctacaacgaggtctgga

SEQ ID NO: 20008 - DNA, 31 bp, Artificial Sequence
  Description of Artificial Sequence:  Enzymatic Nucleic Acid
ggagacagggctagctacaacgataacggtc

SEQ ID NO: 20009 - DNA, 31 bp, Artificial Sequence
  Description of Artificial Sequence:  Enzymatic Nucleic Acid
caaggagaggctagctacaacgaagctaacg

SEQ ID NO: 20010 - DNA, 31 bp, Artificial Sequence
  Description of Artificial Sequence:  Enzymatic Nucleic Acid
gggcttggggctagctacaacgaaaggagac

SEQ ID NO: 20011 - DNA, 31 bp, Artificial Sequence
  Description of Artificial Sequence:  Enzymatic Nucleic Acid
tcctggggggctagctacaacgattggcaag

SEQ ID NO: 20012 - DNA, 31 bp, Artificial Sequence
  Description of Artificial Sequence:  Enzymatic Nucleic Acid
ctgcatcaggctagctacaacgatttcttcc

SEQ ID NO: 20013 - DNA, 31 bp, Artificial Sequence
  Description of Artificial Sequence:  Enzymatic Nucleic Acid
gagctgcaggctagctacaacgacattttct

SEQ ID NO: 20014 - DNA, 31 bp, Artificial Sequence
  Description of Artificial Sequence:  Enzymatic Nucleic Acid
cagagctgggctagctacaacgaatcatttt

SEQ ID NO: 20015 - DNA, 31 bp, Artificial Sequence
  Description of Artificial Sequence:  Enzymatic Nucleic Acid
agccagagggctagctacaacgatgcatcat

SEQ ID NO: 20016 - DNA, 31 bp, Artificial Sequence
  Description of Artificial Sequence:  Enzymatic Nucleic Acid
acaaggagggctagctacaacgacagagctg

SEQ ID NO: 20017 - DNA, 31 bp, Artificial Sequence
  Description of Artificial Sequence:  Enzymatic Nucleic Acid
ctgggagaggctagctacaacgaaaggagcc

SEQ ID NO: 20018 - DNA, 31 bp, Artificial Sequence
  Description of Artificial Sequence:  Enzymatic Nucleic Acid
aggatcagggctagctacaacgactgggaga

SEQ ID NO: 20019 - DNA, 31 bp, Artificial Sequence
  Description of Artificial Sequence:  Enzymatic Nucleic Acid
ataaaggaggctagctacaacgacagcctgg

SEQ ID NO: 20020 - DNA, 31 bp, Artificial Sequence
  Description of Artificial Sequence:  Enzymatic Nucleic Acid
attctgaaggctagctacaacgaaaaggatc

SEQ ID NO: 20021 - DNA, 31 bp, Artificial Sequence
  Description of Artificial Sequence:  Enzymatic Nucleic Acid
ttgtggtaggctagctacaacgatctgaata

SEQ ID NO: 20022 - DNA, 31 bp, Artificial Sequence
  Description of Artificial Sequence:  Enzymatic Nucleic Acid
ctttgtggggctagctacaacgaattctgaa

SEQ ID NO: 20023 - DNA, 31 bp, Artificial Sequence
  Description of Artificial Sequence:  Enzymatic Nucleic Acid
tttctttgggctagctacaacgaggtattct

SEQ ID NO: 20024 - DNA, 31 bp, Artificial Sequence
  Description of Artificial Sequence:  Enzymatic Nucleic Acid
gctgaatgggctagctacaacgacctttctt

SEQ ID NO: 20025 - DNA, 31 bp, Artificial Sequence
  Description of Artificial Sequence:  Enzymatic Nucleic Acid
gagctgaaggctagctacaacgagtcctttc

SEQ ID NO: 20026 - DNA, 31 bp, Artificial Sequence
  Description of Artificial Sequence:  Enzymatic Nucleic Acid
gccttgagggctagctacaacgatgaatgtc

SEQ ID NO: 20027 - DNA, 31 bp, Artificial Sequence
  Description of Artificial Sequence:  Enzymatic Nucleic Acid
gcagggagggctagctacaacgacttgagct

SEQ ID NO: 20028 - DNA, 31 bp, Artificial Sequence
  Description of Artificial Sequence:  Enzymatic Nucleic Acid
caacacggggctagctacaacgaagggagcc

SEQ ID NO: 20029 - DNA, 31 bp, Artificial Sequence
  Description of Artificial Sequence:  Enzymatic Nucleic Acid
cttcaacaggctagctacaacgaggcaggga

SEQ ID NO: 20030 - DNA, 31 bp, Artificial Sequence
  Description of Artificial Sequence:  Enzymatic Nucleic Acid
ctcttcaaggctagctacaacgaacggcagg

SEQ ID NO: 20031 - DNA, 31 bp, Artificial Sequence
  Description of Artificial Sequence:  Enzymatic Nucleic Acid
agtcagaaggctagctacaacgatcttcaac

SEQ ID NO: 20032 - DNA, 31 bp, Artificial Sequence
  Description of Artificial Sequence:  Enzymatic Nucleic Acid
ttgtgcagggctagctacaacgacagaactc

SEQ ID NO: 20033 - DNA, 31 bp, Artificial Sequence
  Description of Artificial Sequence:  Enzymatic Nucleic Acid
ggtttgtgggctagctacaacgaagtcagaa

SEQ ID NO: 20034 - DNA, 31 bp, Artificial Sequence
  Description of Artificial Sequence:  Enzymatic Nucleic Acid
ctggtttgggctagctacaacgagcagtcag

SEQ ID NO: 20035 - DNA, 31 bp, Artificial Sequence
  Description of Artificial Sequence:  Enzymatic Nucleic Acid
gaagctggggctagctacaacgattgtgcag

SEQ ID NO: 20036 - DNA, 31 bp, Artificial Sequence
  Description of Artificial Sequence:  Enzymatic Nucleic Acid
accagaagggctagctacaacgatggtttgt

SEQ ID NO: 20037 - DNA, 31 bp, Artificial Sequence
  Description of Artificial Sequence:  Enzymatic Nucleic Acid
agaagaaaggctagctacaacgacagaagct

SEQ ID NO: 20038 - DNA, 31 bp, Artificial Sequence
  Description of Artificial Sequence:  Enzymatic Nucleic Acid
ggtattcaggctagctacaacgatccagaag

SEQ ID NO: 20039 - DNA, 31 bp, Artificial Sequence
  Description of Artificial Sequence:  Enzymatic Nucleic Acid
tgagggtaggctagctacaacgatcattcca

SEQ ID NO: 20040 - DNA, 31 bp, Artificial Sequence
  Description of Artificial Sequence:  Enzymatic Nucleic Acid
tatgagggggctagctacaacgaattcattc

SEQ ID NO: 20041 - DNA, 31 bp, Artificial Sequence
  Description of Artificial Sequence:  Enzymatic Nucleic Acid
gacagataggctagctacaacgagagggtat

SEQ ID NO: 20042 - DNA, 31 bp, Artificial Sequence
  Description of Artificial Sequence:  Enzymatic Nucleic Acid
aggacagaggctagctacaacgaatgagggt

SEQ ID NO: 20043 - DNA, 31 bp, Artificial Sequence
  Description of Artificial Sequence:  Enzymatic Nucleic Acid
catcaggaggctagctacaacgaagatatga

SEQ ID NO: 20044 - DNA, 31 bp, Artificial Sequence
  Description of Artificial Sequence:  Enzymatic Nucleic Acid
atatcacaggctagctacaacgacaggacag

SEQ ID NO: 20045 - DNA, 31 bp, Artificial Sequence
  Description of Artificial Sequence:  Enzymatic Nucleic Acid
acatatcaggctagctacaacgaatcaggac

SEQ ID NO: 20046 - DNA, 31 bp, Artificial Sequence
  Description of Artificial Sequence:  Enzymatic Nucleic Acid
cagacataggctagctacaacgacacatcag

SEQ ID NO: 20047 - DNA, 31 bp, Artificial Sequence
  Description of Artificial Sequence:  Enzymatic Nucleic Acid
ctcagacaggctagctacaacgaatcacatc

SEQ ID NO: 20048 - DNA, 31 bp, Artificial Sequence
  Description of Artificial Sequence:  Enzymatic Nucleic Acid
gtctcagaggctagctacaacgaatatcaca

SEQ ID NO: 20049 - DNA, 31 bp, Artificial Sequence
  Description of Artificial Sequence:  Enzymatic Nucleic Acid
gcattcagggctagctacaacgactcagaca

SEQ ID NO: 20050 - DNA, 31 bp, Artificial Sequence
  Description of Artificial Sequence:  Enzymatic Nucleic Acid
ctcccgcaggctagctacaacgatcagtctc

SEQ ID NO: 20051 - DNA, 31 bp, Artificial Sequence
  Description of Artificial Sequence:  Enzymatic Nucleic Acid
acctcccgggctagctacaacgaattcagtc

SEQ ID NO: 20052 - DNA, 31 bp, Artificial Sequence
  Description of Artificial Sequence:  Enzymatic Nucleic Acid
acattgaaggctagctacaacgactcccgca

SEQ ID NO: 20053 - DNA, 31 bp, Artificial Sequence
  Description of Artificial Sequence:  Enzymatic Nucleic Acid
gcttcacaggctagctacaacgatgaacctc

SEQ ID NO: 20054 - DNA, 31 bp, Artificial Sequence
  Description of Artificial Sequence:  Enzymatic Nucleic Acid
cagcttcaggctagctacaacgaattgaacc

SEQ ID NO: 20055 - DNA, 31 bp, Artificial Sequence
  Description of Artificial Sequence:  Enzymatic Nucleic Acid
acacacagggctagctacaacgattcacatt

SEQ ID NO: 20056 - DNA, 31 bp, Artificial Sequence
  Description of Artificial Sequence:  Enzymatic Nucleic Acid
accacacaggctagctacaacgaagcttcac

SEQ ID NO: 20057 - DNA, 31 bp, Artificial Sequence
  Description of Artificial Sequence:  Enzymatic Nucleic Acid
acaccacaggctagctacaacgaacagcttc

SEQ ID NO: 20058 - DNA, 31 bp, Artificial Sequence
  Description of Artificial Sequence:  Enzymatic Nucleic Acid
tgacaccaggctagctacaacgaacacagct

SEQ ID NO: 20059 - DNA, 31 bp, Artificial Sequence
  Description of Artificial Sequence:  Enzymatic Nucleic Acid
ctttgacaggctagctacaacgacacacaca

SEQ ID NO: 20060 - DNA, 31 bp, Artificial Sequence
  Description of Artificial Sequence:  Enzymatic Nucleic Acid
aactttgaggctagctacaacgaaccacaca

SEQ ID NO: 20061 - DNA, 31 bp, Artificial Sequence
  Description of Artificial Sequence:  Enzymatic Nucleic Acid
tcctgaaaggctagctacaacgatttgacac

SEQ ID NO: 20062 - DNA, 31 bp, Artificial Sequence
  Description of Artificial Sequence:  Enzymatic Nucleic Acid
gggtaaaaggctagctacaacgaccttcctg

SEQ ID NO: 20063 - DNA, 31 bp, Artificial Sequence
  Description of Artificial Sequence:  Enzymatic Nucleic Acid
caaaagggggctagctacaacgaaaaatcct

SEQ ID NO: 20064 - DNA, 31 bp, Artificial Sequence
  Description of Artificial Sequence:  Enzymatic Nucleic Acid
gggaagaaggctagctacaacgaaaaagggt

SEQ ID NO: 20065 - DNA, 31 bp, Artificial Sequence
  Description of Artificial Sequence:  Enzymatic Nucleic Acid
gttggggaggctagctacaacgaagggggaa

SEQ ID NO: 20066 - DNA, 31 bp, Artificial Sequence
  Description of Artificial Sequence:  Enzymatic Nucleic Acid
agagtgggggctagctacaacgatggggaca

SEQ ID NO: 20067 - DNA, 31 bp, Artificial Sequence
  Description of Artificial Sequence:  Enzymatic Nucleic Acid
ggtgagagggctagctacaacgagggttggg

SEQ ID NO: 20068 - DNA, 31 bp, Artificial Sequence
  Description of Artificial Sequence:  Enzymatic Nucleic Acid
ttgcggggggctagctacaacgagagagtgg

SEQ ID NO: 20069 - DNA, 31 bp, Artificial Sequence
  Description of Artificial Sequence:  Enzymatic Nucleic Acid
atgggttgggctagctacaacgaggggtgag

SEQ ID NO: 20070 - DNA, 31 bp, Artificial Sequence
  Description of Artificial Sequence:  Enzymatic Nucleic Acid
ctgatgggggctagctacaacgatgcggggt

SEQ ID NO: 20071 - DNA, 31 bp, Artificial Sequence
  Description of Artificial Sequence:  Enzymatic Nucleic Acid
aatactgaggctagctacaacgagggttgcg

SEQ ID NO: 20072 - DNA, 31 bp, Artificial Sequence
  Description of Artificial Sequence:  Enzymatic Nucleic Acid
ctaaaataggctagctacaacgatgatgggt

SEQ ID NO: 20073 - DNA, 31 bp, Artificial Sequence
  Description of Artificial Sequence:  Enzymatic Nucleic Acid
aactaaaaggctagctacaacgaactgatgg

SEQ ID NO: 20074 - DNA, 31 bp, Artificial Sequence
  Description of Artificial Sequence:  Enzymatic Nucleic Acid
ccaaataaggctagctacaacgataaaatac

SEQ ID NO: 20075 - DNA, 31 bp, Artificial Sequence
  Description of Artificial Sequence:  Enzymatic Nucleic Acid
aggccaaaggctagctacaacgaaactaaaa

SEQ ID NO: 20076 - DNA, 31 bp, Artificial Sequence
  Description of Artificial Sequence:  Enzymatic Nucleic Acid
agtagaggggctagctacaacgacaaataac

SEQ ID NO: 20077 - DNA, 31 bp, Artificial Sequence
  Description of Artificial Sequence:  Enzymatic Nucleic Acid
tactggagggctagctacaacgaagaggcca

SEQ ID NO: 20078 - DNA, 31 bp, Artificial Sequence
  Description of Artificial Sequence:  Enzymatic Nucleic Acid
caggtttaggctagctacaacgatggagtag

SEQ ID NO: 20079 - DNA, 31 bp, Artificial Sequence
  Description of Artificial Sequence:  Enzymatic Nucleic Acid
caatcaggggctagctacaacgattactgga

SEQ ID NO: 20080 - DNA, 31 bp, Artificial Sequence
  Description of Artificial Sequence:  Enzymatic Nucleic Acid
aaacccaaggctagctacaacgacaggttta

SEQ ID NO: 20081 - DNA, 31 bp, Artificial Sequence
  Description of Artificial Sequence:  Enzymatic Nucleic Acid
tgaacaaaggctagctacaacgaccaatcag

SEQ ID NO: 20082 - DNA, 31 bp, Artificial Sequence
  Description of Artificial Sequence:  Enzymatic Nucleic Acid
agagtgaaggctagctacaacgaaaacccaa

SEQ ID NO: 20083 - DNA, 31 bp, Artificial Sequence
  Description of Artificial Sequence:  Enzymatic Nucleic Acid
tcagagagggctagctacaacgagaacaaac

SEQ ID NO: 20084 - DNA, 31 bp, Artificial Sequence
  Description of Artificial Sequence:  Enzymatic Nucleic Acid
aataatcaggctagctacaacgatcagagag

SEQ ID NO: 20085 - DNA, 31 bp, Artificial Sequence
  Description of Artificial Sequence:  Enzymatic Nucleic Acid
gctaataaggctagctacaacgacattcaga

SEQ ID NO: 20086 - DNA, 31 bp, Artificial Sequence
  Description of Artificial Sequence:  Enzymatic Nucleic Acid
ctggctaaggctagctacaacgaaatcattc

SEQ ID NO: 20087 - DNA, 31 bp, Artificial Sequence
  Description of Artificial Sequence:  Enzymatic Nucleic Acid
aagtctggggctagctacaacgataataatc

SEQ ID NO: 20088 - DNA, 31 bp, Artificial Sequence
  Description of Artificial Sequence:  Enzymatic Nucleic Acid
ttttgaagggctagctacaacgactggctaa

SEQ ID NO: 20089 - DNA, 31 bp, Artificial Sequence
  Description of Artificial Sequence:  Enzymatic Nucleic Acid
taaaataaggctagctacaacgatttgaagt

SEQ ID NO: 20090 - DNA, 31 bp, Artificial Sequence
  Description of Artificial Sequence:  Enzymatic Nucleic Acid
ctataaaaggctagctacaacgaaattttga

SEQ ID NO: 20091 - DNA, 31 bp, Artificial Sequence
  Description of Artificial Sequence:  Enzymatic Nucleic Acid
ttgggctaggctagctacaacgaaaaataat

SEQ ID NO: 20092 - DNA, 31 bp, Artificial Sequence
  Description of Artificial Sequence:  Enzymatic Nucleic Acid
aatttgggggctagctacaacgatataaaat

SEQ ID NO: 20093 - DNA, 31 bp, Artificial Sequence
  Description of Artificial Sequence:  Enzymatic Nucleic Acid
tgttataaggctagctacaacgattgggcta

SEQ ID NO: 20094 - DNA, 31 bp, Artificial Sequence
  Description of Artificial Sequence:  Enzymatic Nucleic Acid
agatgttaggctagctacaacgaaatttggg

SEQ ID NO: 20095 - DNA, 31 bp, Artificial Sequence
  Description of Artificial Sequence:  Enzymatic Nucleic Acid
aatagatgggctagctacaacgatataattt

SEQ ID NO: 20096 - DNA, 31 bp, Artificial Sequence
  Description of Artificial Sequence:  Enzymatic Nucleic Acid
acaatagaggctagctacaacgagttataat

SEQ ID NO: 20097 - DNA, 31 bp, Artificial Sequence
  Description of Artificial Sequence:  Enzymatic Nucleic Acid
taatacaaggctagctacaacgaagatgtta

SEQ ID NO: 20098 - DNA, 31 bp, Artificial Sequence
  Description of Artificial Sequence:  Enzymatic Nucleic Acid
aaataataggctagctacaacgaaatagatg

SEQ ID NO: 20099 - DNA, 31 bp, Artificial Sequence
  Description of Artificial Sequence:  Enzymatic Nucleic Acid
ctaaataaggctagctacaacgaacaataga

SEQ ID NO: 20100 - DNA, 31 bp, Artificial Sequence
  Description of Artificial Sequence:  Enzymatic Nucleic Acid
agtctaaaggctagctacaacgaaatacaat

SEQ ID NO: 20101 - DNA, 31 bp, Artificial Sequence
  Description of Artificial Sequence:  Enzymatic Nucleic Acid
gttaaaagggctagctacaacgactaaataa

SEQ ID NO: 20102 - DNA, 31 bp, Artificial Sequence
  Description of Artificial Sequence:  Enzymatic Nucleic Acid
tctatatgggctagctacaacgataaaagtc

SEQ ID NO: 20103 - DNA, 31 bp, Artificial Sequence
  Description of Artificial Sequence:  Enzymatic Nucleic Acid
gctctataggctagctacaacgagttaaaag

SEQ ID NO: 20104 - DNA, 31 bp, Artificial Sequence
  Description of Artificial Sequence:  Enzymatic Nucleic Acid
tagctctaggctagctacaacgaatgttaaa

SEQ ID NO: 20105 - DNA, 31 bp, Artificial Sequence
  Description of Artificial Sequence:  Enzymatic Nucleic Acid
agaaatagggctagctacaacgatctatatg

SEQ ID NO: 20106 - DNA, 31 bp, Artificial Sequence
  Description of Artificial Sequence:  Enzymatic Nucleic Acid
agtagaaaggctagctacaacgaagctctat

SEQ ID NO: 20107 - DNA, 31 bp, Artificial Sequence
  Description of Artificial Sequence:  Enzymatic Nucleic Acid
aaaatcagggctagctacaacgaagaaatag

SEQ ID NO: 20108 - DNA, 31 bp, Artificial Sequence
  Description of Artificial Sequence:  Enzymatic Nucleic Acid
ggcaaaaaggctagctacaacgacagtagaa

SEQ ID NO: 20109 - DNA, 31 bp, Artificial Sequence
  Description of Artificial Sequence:  Enzymatic Nucleic Acid
aacaagggggctagctacaacgaaaaaatca

SEQ ID NO: 20110 - DNA, 31 bp, Artificial Sequence
  Description of Artificial Sequence:  Enzymatic Nucleic Acid
ggacagaaggctagctacaacgaaagggcaa

SEQ ID NO: 20111 - DNA, 31 bp, Artificial Sequence
  Description of Artificial Sequence:  Enzymatic Nucleic Acid
aaaaaggaggctagctacaacgaagaacaag

SEQ ID NO: 20112 - DNA, 31 bp, Artificial Sequence
  Description of Artificial Sequence:  Enzymatic Nucleic Acid
aaaacacaggctagctacaacgatttctttt

SEQ ID NO: 20113 - DNA, 31 bp, Artificial Sequence
  Description of Artificial Sequence:  Enzymatic Nucleic Acid
aaaaaacaggctagctacaacgaattttctt

SEQ ID NO: 20114 - DNA, 31 bp, Artificial Sequence
  Description of Artificial Sequence:  Enzymatic Nucleic Acid
acaaaaaaggctagctacaacgaacattttc

SEQ ID NO: 20115 - DNA, 31 bp, Artificial Sequence
  Description of Artificial Sequence:  Enzymatic Nucleic Acid
gtaccaaaggctagctacaacgaaaaaaaca

SEQ ID NO: 20116 - DNA, 31 bp, Artificial Sequence
  Description of Artificial Sequence:  Enzymatic Nucleic Acid
ctatggtaggctagctacaacgacaaacaaa

SEQ ID NO: 20117 - DNA, 31 bp, Artificial Sequence
  Description of Artificial Sequence:  Enzymatic Nucleic Acid
cactatggggctagctacaacgaaccaaaca

SEQ ID NO: 20118 - DNA, 31 bp, Artificial Sequence
  Description of Artificial Sequence:  Enzymatic Nucleic Acid
tcacactaggctagctacaacgaggtaccaa

SEQ ID NO: 20119 - DNA, 31 bp, Artificial Sequence
  Description of Artificial Sequence:  Enzymatic Nucleic Acid
atttcacaggctagctacaacgatatggtac

SEQ ID NO: 20120 - DNA, 31 bp, Artificial Sequence
  Description of Artificial Sequence:  Enzymatic Nucleic Acid
gcatttcaggctagctacaacgaactatggt

SEQ ID NO: 20121 - DNA, 31 bp, Artificial Sequence
  Description of Artificial Sequence:  Enzymatic Nucleic Acid
tcccagcaggctagctacaacgattcacact

SEQ ID NO: 20122 - DNA, 31 bp, Artificial Sequence
  Description of Artificial Sequence:  Enzymatic Nucleic Acid
gttcccagggctagctacaacgaatttcaca

SEQ ID NO: 20123 - DNA, 31 bp, Artificial Sequence
  Description of Artificial Sequence:  Enzymatic Nucleic Acid
agtcattgggctagctacaacgatcccagca

SEQ ID NO: 20124 - DNA, 31 bp, Artificial Sequence
  Description of Artificial Sequence:  Enzymatic Nucleic Acid
tatagtcaggctagctacaacgatgttccca

SEQ ID NO: 20125 - DNA, 31 bp, Artificial Sequence
  Description of Artificial Sequence:  Enzymatic Nucleic Acid
tcttatagggctagctacaacgacattgttc

SEQ ID NO: 20126 - DNA, 31 bp, Artificial Sequence
  Description of Artificial Sequence:  Enzymatic Nucleic Acid
atgtcttaggctagctacaacgaagtcattg

SEQ ID NO: 20127 - DNA, 31 bp, Artificial Sequence
  Description of Artificial Sequence:  Enzymatic Nucleic Acid
atagcatgggctagctacaacgacttatagt

SEQ ID NO: 20128 - DNA, 31 bp, Artificial Sequence
  Description of Artificial Sequence:  Enzymatic Nucleic Acid
ccatagcaggctagctacaacgagtcttata

SEQ ID NO: 20129 - DNA, 31 bp, Artificial Sequence
  Description of Artificial Sequence:  Enzymatic Nucleic Acid
tgccatagggctagctacaacgaatgtctta

SEQ ID NO: 20130 - DNA, 31 bp, Artificial Sequence
  Description of Artificial Sequence:  Enzymatic Nucleic Acid
atgtgccaggctagctacaacgaagcatgtc

SEQ ID NO: 20131 - DNA, 31 bp, Artificial Sequence
  Description of Artificial Sequence:  Enzymatic Nucleic Acid
tatatgtgggctagctacaacgacatagcat

SEQ ID NO: 20132 - DNA, 31 bp, Artificial Sequence
  Description of Artificial Sequence:  Enzymatic Nucleic Acid
aatatatgggctagctacaacgagccatagc

SEQ ID NO: 20133 - DNA, 31 bp, Artificial Sequence
  Description of Artificial Sequence:  Enzymatic Nucleic Acid
taaatataggctagctacaacgagtgccata

SEQ ID NO: 20134 - DNA, 31 bp, Artificial Sequence
  Description of Artificial Sequence:  Enzymatic Nucleic Acid
tataaataggctagctacaacgaatgtgcca

SEQ ID NO: 20135 - DNA, 31 bp, Artificial Sequence
  Description of Artificial Sequence:  Enzymatic Nucleic Acid
actataaaggctagctacaacgaatatgtgc

SEQ ID NO: 20136 - DNA, 31 bp, Artificial Sequence
  Description of Artificial Sequence:  Enzymatic Nucleic Acid
acagactaggctagctacaacgaaaatatat

SEQ ID NO: 20137 - DNA, 31 bp, Artificial Sequence
  Description of Artificial Sequence:  Enzymatic Nucleic Acid
taaacagaggctagctacaacgatataaata

SEQ ID NO: 20138 - DNA, 31 bp, Artificial Sequence
  Description of Artificial Sequence:  Enzymatic Nucleic Acid
tacataaaggctagctacaacgaagactata

SEQ ID NO: 20139 - DNA, 31 bp, Artificial Sequence
  Description of Artificial Sequence:  Enzymatic Nucleic Acid
tttctacaggctagctacaacgaaaacagac

SEQ ID NO: 20140 - DNA, 31 bp, Artificial Sequence
  Description of Artificial Sequence:  Enzymatic Nucleic Acid
tgtttctaggctagctacaacgaataaacag

SEQ ID NO: 20141 - DNA, 31 bp, Artificial Sequence
  Description of Artificial Sequence:  Enzymatic Nucleic Acid
tacatttgggctagctacaacgattctacat

SEQ ID NO: 20142 - DNA, 31 bp, Artificial Sequence
  Description of Artificial Sequence:  Enzymatic Nucleic Acid
atattacaggctagctacaacgattgtttct

SEQ ID NO: 20143 - DNA, 31 bp, Artificial Sequence
  Description of Artificial Sequence:  Enzymatic Nucleic Acid
atatattaggctagctacaacgaatttgttt

SEQ ID NO: 20144 - DNA, 31 bp, Artificial Sequence
  Description of Artificial Sequence:  Enzymatic Nucleic Acid
ttaatataggctagctacaacgatacatttg

SEQ ID NO: 20145 - DNA, 31 bp, Artificial Sequence
  Description of Artificial Sequence:  Enzymatic Nucleic Acid
ctttaataggctagctacaacgaattacatt

SEQ ID NO: 20146 - DNA, 31 bp, Artificial Sequence
  Description of Artificial Sequence:  Enzymatic Nucleic Acid
ggctttaaggctagctacaacgaatattaca

SEQ ID NO: 20147 - DNA, 31 bp, Artificial Sequence
  Description of Artificial Sequence:  Enzymatic Nucleic Acid
atataaggggctagctacaacgatttaatat

SEQ ID NO: 20148 - DNA, 31 bp, Artificial Sequence
  Description of Artificial Sequence:  Enzymatic Nucleic Acid
attatataggctagctacaacgaaaggcttt

SEQ ID NO: 20149 - DNA, 31 bp, Artificial Sequence
  Description of Artificial Sequence:  Enzymatic Nucleic Acid
tcattataggctagctacaacgaataaggct

SEQ ID NO: 20150 - DNA, 31 bp, Artificial Sequence
  Description of Artificial Sequence:  Enzymatic Nucleic Acid
gttcattaggctagctacaacgaatataagg

SEQ ID NO: 20151 - DNA, 31 bp, Artificial Sequence
  Description of Artificial Sequence:  Enzymatic Nucleic Acid
aaagttcaggctagctacaacgatatatata

SEQ ID NO: 20152 - DNA, 31 bp, Artificial Sequence
  Description of Artificial Sequence:  Enzymatic Nucleic Acid
gtacaaagggctagctacaacgatcattata

SEQ ID NO: 20153 - DNA, 31 bp, Artificial Sequence
  Description of Artificial Sequence:  Enzymatic Nucleic Acid
gaatagtaggctagctacaacgaaaagttca

SEQ ID NO: 20154 - DNA, 31 bp, Artificial Sequence
  Description of Artificial Sequence:  Enzymatic Nucleic Acid
gtgaatagggctagctacaacgaacaaagtt

SEQ ID NO: 20155 - DNA, 31 bp, Artificial Sequence
  Description of Artificial Sequence:  Enzymatic Nucleic Acid
aatgtgaaggctagctacaacgaagtacaaa

SEQ ID NO: 20156 - DNA, 31 bp, Artificial Sequence
  Description of Artificial Sequence:  Enzymatic Nucleic Acid
acaaaatgggctagctacaacgagaatagta

SEQ ID NO: 20157 - DNA, 31 bp, Artificial Sequence
  Description of Artificial Sequence:  Enzymatic Nucleic Acid
atacaaaaggctagctacaacgagtgaatag

SEQ ID NO: 20158 - DNA, 31 bp, Artificial Sequence
  Description of Artificial Sequence:  Enzymatic Nucleic Acid
tactgataggctagctacaacgaaaaatgtg

SEQ ID NO: 20159 - DNA, 31 bp, Artificial Sequence
  Description of Artificial Sequence:  Enzymatic Nucleic Acid
aatactgaggctagctacaacgaacaaaatg

SEQ ID NO: 20160 - DNA, 31 bp, Artificial Sequence
  Description of Artificial Sequence:  Enzymatic Nucleic Acid
acataataggctagctacaacgatgatacaa

SEQ ID NO: 20161 - DNA, 31 bp, Artificial Sequence
  Description of Artificial Sequence:  Enzymatic Nucleic Acid
ctacataaggctagctacaacgaactgatac

SEQ ID NO: 20162 - DNA, 31 bp, Artificial Sequence
  Description of Artificial Sequence:  Enzymatic Nucleic Acid
atgctacaggctagctacaacgaaatactga

SEQ ID NO: 20163 - DNA, 31 bp, Artificial Sequence
  Description of Artificial Sequence:  Enzymatic Nucleic Acid
ttatgctaggctagctacaacgaataatact

SEQ ID NO: 20164 - DNA, 31 bp, Artificial Sequence
  Description of Artificial Sequence:  Enzymatic Nucleic Acid
ttgttatgggctagctacaacgatacataat

SEQ ID NO: 20165 - DNA, 31 bp, Artificial Sequence
  Description of Artificial Sequence:  Enzymatic Nucleic Acid
ctttgttaggctagctacaacgagctacata

SEQ ID NO: 20166 - DNA, 31 bp, Artificial Sequence
  Description of Artificial Sequence:  Enzymatic Nucleic Acid
gacctttgggctagctacaacgatatgctac

SEQ ID NO: 20167 - DNA, 31 bp, Artificial Sequence
  Description of Artificial Sequence:  Enzymatic Nucleic Acid
cattatgaggctagctacaacgactttgtta

SEQ ID NO: 20168 - DNA, 31 bp, Artificial Sequence
  Description of Artificial Sequence:  Enzymatic Nucleic Acid
aagcattaggctagctacaacgagacctttg

SEQ ID NO: 20169 - DNA, 31 bp, Artificial Sequence
  Description of Artificial Sequence:  Enzymatic Nucleic Acid
tgaaagcaggctagctacaacgatatgacct

SEQ ID NO: 20170 - DNA, 31 bp, Artificial Sequence
  Description of Artificial Sequence:  Enzymatic Nucleic Acid
gctgaaagggctagctacaacgaattatgac

SEQ ID NO: 20171 - DNA, 31 bp, Artificial Sequence
  Description of Artificial Sequence:  Enzymatic Nucleic Acid
atcaattgggctagctacaacgatgaaagca

SEQ ID NO: 20172 - DNA, 31 bp, Artificial Sequence
  Description of Artificial Sequence:  Enzymatic Nucleic Acid
gacatcaaggctagctacaacgatgctgaaa

SEQ ID NO: 20173 - DNA, 31 bp, Artificial Sequence
  Description of Artificial Sequence:  Enzymatic Nucleic Acid
aaatgacaggctagctacaacgacaattgct

SEQ ID NO: 20174 - DNA, 31 bp, Artificial Sequence
  Description of Artificial Sequence:  Enzymatic Nucleic Acid
taaaatgaggctagctacaacgaatcaattg

SEQ ID NO: 20175 - DNA, 31 bp, Artificial Sequence
  Description of Artificial Sequence:  Enzymatic Nucleic Acid
taataaaaggctagctacaacgagacatcaa

SEQ ID NO: 20176 - DNA, 31 bp, Artificial Sequence
  Description of Artificial Sequence:  Enzymatic Nucleic Acid
ttctttaaggctagctacaacgaaaaatgac

SEQ ID NO: 20177 - DNA, 31 bp, Artificial Sequence
  Description of Artificial Sequence:  Enzymatic Nucleic Acid
tttcaatgggctagctacaacgatctttaat

SEQ ID NO: 20178 - DNA, 31 bp, Artificial Sequence
  Description of Artificial Sequence:  Enzymatic Nucleic Acid
tttttcaaggctagctacaacgagttcttta

SEQ ID NO: 20179 - RNA, 37 nt, Artificial Sequence
  Description of Artificial Sequence:  Enzymatic Nucleic Acid
acugaccggccgaaaggcgagugaggucuucucccgg

SEQ ID NO: 20180 - RNA, 37 nt, Artificial Sequence
  Description of Artificial Sequence:  Enzymatic Nucleic Acid
cacacugagccgaaaggcgagugaggucucgcucucc

SEQ ID NO: 20181 - RNA, 37 nt, Artificial Sequence
  Description of Artificial Sequence:  Enzymatic Nucleic Acid
accacacagccgaaaggcgagugaggucuugaccgcu

SEQ ID NO: 20182 - RNA, 37 nt, Artificial Sequence
  Description of Artificial Sequence:  Enzymatic Nucleic Acid
cgaccacagccgaaaggcgagugaggucuacugaccg

SEQ ID NO: 20183 - RNA, 37 nt, Artificial Sequence
  Description of Artificial Sequence:  Enzymatic Nucleic Acid
agcgaccagccgaaaggcgagugaggucuacacugac

SEQ ID NO: 20184 - RNA, 37 nt, Artificial Sequence
  Description of Artificial Sequence:  Enzymatic Nucleic Acid
cgcagcgagccgaaaggcgagugaggucucacacacu

SEQ ID NO: 20185 - RNA, 37 nt, Artificial Sequence
  Description of Artificial Sequence:  Enzymatic Nucleic Acid
aaacgcaggccgaaaggcgagugaggucugaccacac

SEQ ID NO: 20186 - RNA, 37 nt, Artificial Sequence
  Description of Artificial Sequence:  Enzymatic Nucleic Acid
aggaaacggccgaaaggcgagugaggucuagcgacca

SEQ ID NO: 20187 - RNA, 37 nt, Artificial Sequence
  Description of Artificial Sequence:  Enzymatic Nucleic Acid
agaggaaagccgaaaggcgagugaggucugcagcgac

SEQ ID NO: 20188 - RNA, 37 nt, Artificial Sequence
  Description of Artificial Sequence:  Enzymatic Nucleic Acid
ggcgcagggccgaaaggcgagugaggucuagaggaaa

SEQ ID NO: 20189 - RNA, 37 nt, Artificial Sequence
  Description of Artificial Sequence:  Enzymatic Nucleic Acid
gcccggcggccgaaaggcgagugaggucuaggcagag

SEQ ID NO: 20190 - RNA, 37 nt, Artificial Sequence
  Description of Artificial Sequence:  Enzymatic Nucleic Acid
augcccgggccgaaaggcgagugaggucugcaggcag

SEQ ID NO: 20191 - RNA, 37 nt, Artificial Sequence
  Description of Artificial Sequence:  Enzymatic Nucleic Acid
aagugauggccgaaaggcgagugaggucuccggcgca

SEQ ID NO: 20192 - RNA, 37 nt, Artificial Sequence
  Description of Artificial Sequence:  Enzymatic Nucleic Acid
gcggcgcggccgaaaggcgagugaggucuaagugaug

SEQ ID NO: 20193 - RNA, 37 nt, Artificial Sequence
  Description of Artificial Sequence:  Enzymatic Nucleic Acid
cugcggcggccgaaaggcgagugaggucugcaaguga

SEQ ID NO: 20194 - RNA, 37 nt, Artificial Sequence
  Description of Artificial Sequence:  Enzymatic Nucleic Acid
uucugcgggccgaaaggcgagugaggucugcgcaagu

SEQ ID NO: 20195 - RNA, 37 nt, Artificial Sequence
  Description of Artificial Sequence:  Enzymatic Nucleic Acid
acuuucuggccgaaaggcgagugaggucuggcgcgca

SEQ ID NO: 20196 - RNA, 37 nt, Artificial Sequence
  Description of Artificial Sequence:  Enzymatic Nucleic Acid
cagacggagccgaaaggcgagugaggucuuuucugcg

SEQ ID NO: 20197 - RNA, 37 nt, Artificial Sequence
  Description of Artificial Sequence:  Enzymatic Nucleic Acid
cugccagagccgaaaggcgagugaggucuggacuuuc

SEQ ID NO: 20198 - RNA, 37 nt, Artificial Sequence
  Description of Artificial Sequence:  Enzymatic Nucleic Acid
ccaggcuggccgaaaggcgagugaggucucagacgga

SEQ ID NO: 20199 - RNA, 37 nt, Artificial Sequence
  Description of Artificial Sequence:  Enzymatic Nucleic Acid
uauccagggccgaaaggcgagugaggucuugccagac

SEQ ID NO: 20200 - RNA, 37 nt, Artificial Sequence
  Description of Artificial Sequence:  Enzymatic Nucleic Acid
ugcggguggccgaaaggcgagugaggucucgguagga

SEQ ID NO: 20201 - RNA, 37 nt, Artificial Sequence
  Description of Artificial Sequence:  Enzymatic Nucleic Acid
ggcgucuggccgaaaggcgagugaggucugggugccg

SEQ ID NO: 20202 - RNA, 37 nt, Artificial Sequence
  Description of Artificial Sequence:  Enzymatic Nucleic Acid
ugcagggggccgaaaggcgagugaggucugucugcgg

SEQ ID NO: 20203 - RNA, 37 nt, Artificial Sequence
  Description of Artificial Sequence:  Enzymatic Nucleic Acid
ggcggcuggccgaaaggcgagugaggucuaggggcgu

SEQ ID NO: 20204 - RNA, 37 nt, Artificial Sequence
  Description of Artificial Sequence:  Enzymatic Nucleic Acid
accggcgggccgaaaggcgagugaggucuugcagggg

SEQ ID NO: 20205 - RNA, 37 nt, Artificial Sequence
  Description of Artificial Sequence:  Enzymatic Nucleic Acid
ccgaccgggccgaaaggcgagugaggucuggcugcag

SEQ ID NO: 20206 - RNA, 37 nt, Artificial Sequence
  Description of Artificial Sequence:  Enzymatic Nucleic Acid
ggcgccgagccgaaaggcgagugaggucucggcggcu

SEQ ID NO: 20207 - RNA, 37 nt, Artificial Sequence
  Description of Artificial Sequence:  Enzymatic Nucleic Acid
cccgggcggccgaaaggcgagugaggucucgaccggc

SEQ ID NO: 20208 - RNA, 37 nt, Artificial Sequence
  Description of Artificial Sequence:  Enzymatic Nucleic Acid
agcccggggccgaaaggcgagugaggucugccgaccg

SEQ ID NO: 20209 - RNA, 37 nt, Artificial Sequence
  Description of Artificial Sequence:  Enzymatic Nucleic Acid
cuagggaggccgaaaggcgagugaggucuccgggcgc

SEQ ID NO: 20210 - RNA, 37 nt, Artificial Sequence
  Description of Artificial Sequence:  Enzymatic Nucleic Acid
gcacaggggccgaaaggcgagugaggucuuagggagc

SEQ ID NO: 20211 - RNA, 37 nt, Artificial Sequence
  Description of Artificial Sequence:  Enzymatic Nucleic Acid
ugagcgcagccgaaaggcgagugaggucuagggcuag

SEQ ID NO: 20212 - RNA, 37 nt, Artificial Sequence
  Description of Artificial Sequence:  Enzymatic Nucleic Acid
guugagcggccgaaaggcgagugaggucuacagggcu

SEQ ID NO: 20213 - RNA, 37 nt, Artificial Sequence
  Description of Artificial Sequence:  Enzymatic Nucleic Acid
caguugaggccgaaaggcgagugaggucugcacaggg

SEQ ID NO: 20214 - RNA, 37 nt, Artificial Sequence
  Description of Artificial Sequence:  Enzymatic Nucleic Acid
gcgcaggagccgaaaggcgagugaggucuaguugagc

SEQ ID NO: 20215 - RNA, 37 nt, Artificial Sequence
  Description of Artificial Sequence:  Enzymatic Nucleic Acid
ccgcagcggccgaaaggcgagugaggucuaggacagu

SEQ ID NO: 20216 - RNA, 37 nt, Artificial Sequence
  Description of Artificial Sequence:  Enzymatic Nucleic Acid
ccccgcaggccgaaaggcgagugaggucugcaggaca

SEQ ID NO: 20217 - RNA, 37 nt, Artificial Sequence
  Description of Artificial Sequence:  Enzymatic Nucleic Acid
gcaccccggccgaaaggcgagugaggucuagcgcagg

SEQ ID NO: 20218 - RNA, 37 nt, Artificial Sequence
  Description of Artificial Sequence:  Enzymatic Nucleic Acid
ucgcggcagccgaaaggcgagugaggucucccgcagc

SEQ ID NO: 20219 - RNA, 37 nt, Artificial Sequence
  Description of Artificial Sequence:  Enzymatic Nucleic Acid
acucgcgggccgaaaggcgagugaggucuaccccgca

SEQ ID NO: 20220 - RNA, 37 nt, Artificial Sequence
  Description of Artificial Sequence:  Enzymatic Nucleic Acid
ggaacucggccgaaaggcgagugaggucuggcacccc

SEQ ID NO: 20221 - RNA, 37 nt, Artificial Sequence
  Description of Artificial Sequence:  Enzymatic Nucleic Acid
agguggaagccgaaaggcgagugaggucuucgcggca

SEQ ID NO: 20222 - RNA, 37 nt, Artificial Sequence
  Description of Artificial Sequence:  Enzymatic Nucleic Acid
aggaggcggccgaaaggcgagugaggucuggaggugg

SEQ ID NO: 20223 - RNA, 37 nt, Artificial Sequence
  Description of Artificial Sequence:  Enzymatic Nucleic Acid
gaaggagggccgaaaggcgagugaggucugcggaggu

SEQ ID NO: 20224 - RNA, 37 nt, Artificial Sequence
  Description of Artificial Sequence:  Enzymatic Nucleic Acid
ucccagcggccgaaaggcgagugaggucucugucuag

SEQ ID NO: 20225 - RNA, 37 nt, Artificial Sequence
  Description of Artificial Sequence:  Enzymatic Nucleic Acid
ucucccaggccgaaaggcgagugaggucugccugucu

SEQ ID NO: 20226 - RNA, 37 nt, Artificial Sequence
  Description of Artificial Sequence:  Enzymatic Nucleic Acid
cucgggaggccgaaaggcgagugaggucucgguucuu

SEQ ID NO: 20227 - RNA, 37 nt, Artificial Sequence
  Description of Artificial Sequence:  Enzymatic Nucleic Acid
gcccagaagccgaaaggcgagugaggucuucgggagc

SEQ ID NO: 20228 - RNA, 37 nt, Artificial Sequence
  Description of Artificial Sequence:  Enzymatic Nucleic Acid
gcgaaauggccgaaaggcgagugaggucuccagaacu

SEQ ID NO: 20229 - RNA, 37 nt, Artificial Sequence
  Description of Artificial Sequence:  Enzymatic Nucleic Acid
gagccggggccgaaaggcgagugaggucugaaaugcc

SEQ ID NO: 20230 - RNA, 37 nt, Artificial Sequence
  Description of Artificial Sequence:  Enzymatic Nucleic Acid
accucgaggccgaaaggcgagugaggucucgggcgaa

SEQ ID NO: 20231 - RNA, 37 nt, Artificial Sequence
  Description of Artificial Sequence:  Enzymatic Nucleic Acid
auccugcagccgaaaggcgagugaggucucucgagcc

SEQ ID NO: 20232 - RNA, 37 nt, Artificial Sequence
  Description of Artificial Sequence:  Enzymatic Nucleic Acid
gcauccuggccgaaaggcgagugaggucuaccucgag

SEQ ID NO: 20233 - RNA, 37 nt, Artificial Sequence
  Description of Artificial Sequence:  Enzymatic Nucleic Acid
uugcucuggccgaaaggcgagugaggucuauccugca

SEQ ID NO: 20234 - RNA, 37 nt, Artificial Sequence
  Description of Artificial Sequence:  Enzymatic Nucleic Acid
gcaccuuggccgaaaggcgagugaggucuucugcauc

SEQ ID NO: 20235 - RNA, 37 nt, Artificial Sequence
  Description of Artificial Sequence:  Enzymatic Nucleic Acid
cagcagcagccgaaaggcgagugaggucucuugcucu

SEQ ID NO: 20236 - RNA, 37 nt, Artificial Sequence
  Description of Artificial Sequence:  Enzymatic Nucleic Acid
gccagcaggccgaaaggcgagugaggucuaccuugcu

SEQ ID NO: 20237 - RNA, 37 nt, Artificial Sequence
  Description of Artificial Sequence:  Enzymatic Nucleic Acid
acggccaggccgaaaggcgagugaggucuagcaccuu

SEQ ID NO: 20238 - RNA, 37 nt, Artificial Sequence
  Description of Artificial Sequence:  Enzymatic Nucleic Acid
ggcgacgggccgaaaggcgagugaggucucagcagca

SEQ ID NO: 20239 - RNA, 37 nt, Artificial Sequence
  Description of Artificial Sequence:  Enzymatic Nucleic Acid
cagggcgagccgaaaggcgagugaggucuggccagca

SEQ ID NO: 20240 - RNA, 37 nt, Artificial Sequence
  Description of Artificial Sequence:  Enzymatic Nucleic Acid
ccacaggggccgaaaggcgagugaggucugacggcca

SEQ ID NO: 20241 - RNA, 37 nt, Artificial Sequence
  Description of Artificial Sequence:  Enzymatic Nucleic Acid
cagagccagccgaaaggcgagugaggucuagggcgac

SEQ ID NO: 20242 - RNA, 37 nt, Artificial Sequence
  Description of Artificial Sequence:  Enzymatic Nucleic Acid
acgcagaggccgaaaggcgagugaggucucacagggc

SEQ ID NO: 20243 - RNA, 37 nt, Artificial Sequence
  Description of Artificial Sequence:  Enzymatic Nucleic Acid
ucuccacggccgaaaggcgagugaggucuagagccac

SEQ ID NO: 20244 - RNA, 37 nt, Artificial Sequence
  Description of Artificial Sequence:  Enzymatic Nucleic Acid
ggucuccagccgaaaggcgagugaggucugcagagcc

SEQ ID NO: 20245 - RNA, 37 nt, Artificial Sequence
  Description of Artificial Sequence:  Enzymatic Nucleic Acid
agaggcgggccgaaaggcgagugaggucuccgggucu

SEQ ID NO: 20246 - RNA, 37 nt, Artificial Sequence
  Description of Artificial Sequence:  Enzymatic Nucleic Acid
cacagagggccgaaaggcgagugaggucuggcccggg

SEQ ID NO: 20247 - RNA, 37 nt, Artificial Sequence
  Description of Artificial Sequence:  Enzymatic Nucleic Acid
caaacccagccgaaaggcgagugaggucuagaggcgg

SEQ ID NO: 20248 - RNA, 37 nt, Artificial Sequence
  Description of Artificial Sequence:  Enzymatic Nucleic Acid
uaggcaaagccgaaaggcgagugaggucuccacagag

SEQ ID NO: 20249 - RNA, 37 nt, Artificial Sequence
  Description of Artificial Sequence:  Enzymatic Nucleic Acid
acacuagggccgaaaggcgagugaggucuaaacccac

SEQ ID NO: 20250 - RNA, 37 nt, Artificial Sequence
  Description of Artificial Sequence:  Enzymatic Nucleic Acid
gagaaacagccgaaaggcgagugaggucuuaggcaaa

SEQ ID NO: 20251 - RNA, 37 nt, Artificial Sequence
  Description of Artificial Sequence:  Enzymatic Nucleic Acid
aagagaaagccgaaaggcgagugaggucuacuaggca

SEQ ID NO: 20252 - RNA, 37 nt, Artificial Sequence
  Description of Artificial Sequence:  Enzymatic Nucleic Acid
agccuggggccgaaaggcgagugaggucuagaucaag

SEQ ID NO: 20253 - RNA, 37 nt, Artificial Sequence
  Description of Artificial Sequence:  Enzymatic Nucleic Acid
augcugaggccgaaaggcgagugaggucucugggcag

SEQ ID NO: 20254 - RNA, 37 nt, Artificial Sequence
  Description of Artificial Sequence:  Enzymatic Nucleic Acid
uuuguauggccgaaaggcgagugaggucuugagccug

SEQ ID NO: 20255 - RNA, 37 nt, Artificial Sequence
  Description of Artificial Sequence:  Enzymatic Nucleic Acid
uguauuaggccgaaaggcgagugaggucucuuaauug

SEQ ID NO: 20256 - RNA, 37 nt, Artificial Sequence
  Description of Artificial Sequence:  Enzymatic Nucleic Acid
guccccuggccgaaaggcgagugaggucuaaguaauu

SEQ ID NO: 20257 - RNA, 37 nt, Artificial Sequence
  Description of Artificial Sequence:  Enzymatic Nucleic Acid
ggccaaaggccgaaaggcgagugaggucucaguccaa

SEQ ID NO: 20258 - RNA, 37 nt, Artificial Sequence
  Description of Artificial Sequence:  Enzymatic Nucleic Acid
uuauuggggccgaaaggcgagugaggucucaaagcca

SEQ ID NO: 20259 - RNA, 37 nt, Artificial Sequence
  Description of Artificial Sequence:  Enzymatic Nucleic Acid
cacugccagccgaaaggcgagugaggucuucugauua

SEQ ID NO: 20260 - RNA, 37 nt, Artificial Sequence
  Description of Artificial Sequence:  Enzymatic Nucleic Acid
gcucacuggccgaaaggcgagugaggucucacucuga

SEQ ID NO: 20261 - RNA, 37 nt, Artificial Sequence
  Description of Artificial Sequence:  Enzymatic Nucleic Acid
uuugcucagccgaaaggcgagugaggucuugccacuc

SEQ ID NO: 20262 - RNA, 37 nt, Artificial Sequence
  Description of Artificial Sequence:  Enzymatic Nucleic Acid
acccuuuggccgaaaggcgagugaggucuucacugcc

SEQ ID NO: 20263 - RNA, 37 nt, Artificial Sequence
  Description of Artificial Sequence:  Enzymatic Nucleic Acid
caccuccagccgaaaggcgagugaggucuccuuugcu

SEQ ID NO: 20264 - RNA, 37 nt, Artificial Sequence
  Description of Artificial Sequence:  Enzymatic Nucleic Acid
cucagucagccgaaaggcgagugaggucucuccaccc

SEQ ID NO: 20265 - RNA, 37 nt, Artificial Sequence
  Description of Artificial Sequence:  Enzymatic Nucleic Acid
ucgcugcagccgaaaggcgagugaggucuucagucac

SEQ ID NO: 20266 - RNA, 37 nt, Artificial Sequence
  Description of Artificial Sequence:  Enzymatic Nucleic Acid
caucgcuggccgaaaggcgagugaggucuacucaguc

SEQ ID NO: 20267 - RNA, 37 nt, Artificial Sequence
  Description of Artificial Sequence:  Enzymatic Nucleic Acid
ggccaucggccgaaaggcgagugaggucuugcacuca

SEQ ID NO: 20268 - RNA, 37 nt, Artificial Sequence
  Description of Artificial Sequence:  Enzymatic Nucleic Acid
agaagagggccgaaaggcgagugaggucucaucgcug

SEQ ID NO: 20269 - RNA, 37 nt, Artificial Sequence
  Description of Artificial Sequence:  Enzymatic Nucleic Acid
gugucuuagccgaaaggcgagugaggucuagaagagg

SEQ ID NO: 20270 - RNA, 37 nt, Artificial Sequence
  Description of Artificial Sequence:  Enzymatic Nucleic Acid
uccgaucagccgaaaggcgagugaggucuuuuuggaa

SEQ ID NO: 20271 - RNA, 37 nt, Artificial Sequence
  Description of Artificial Sequence:  Enzymatic Nucleic Acid
cuuguagggccgaaaggcgagugaggucuuccagugu

SEQ ID NO: 20272 - RNA, 37 nt, Artificial Sequence
  Description of Artificial Sequence:  Enzymatic Nucleic Acid
uagaagcagccgaaaggcgagugaggucuuuguaggc

SEQ ID NO: 20273 - RNA, 37 nt, Artificial Sequence
  Description of Artificial Sequence:  Enzymatic Nucleic Acid
gguagaaggccgaaaggcgagugaggucuacuuguag

SEQ ID NO: 20274 - RNA, 37 nt, Artificial Sequence
  Description of Artificial Sequence:  Enzymatic Nucleic Acid
gaccgagggccgaaaggcgagugaggucucaagucag

SEQ ID NO: 20275 - RNA, 37 nt, Artificial Sequence
  Description of Artificial Sequence:  Enzymatic Nucleic Acid
auaaaugagccgaaaggcgagugaggucucgaggcca

SEQ ID NO: 20276 - RNA, 37 nt, Artificial Sequence
  Description of Artificial Sequence:  Enzymatic Nucleic Acid
aacauagagccgaaaggcgagugaggucuauaaauga

SEQ ID NO: 20277 - RNA, 37 nt, Artificial Sequence
  Description of Artificial Sequence:  Enzymatic Nucleic Acid
aucuugaagccgaaaggcgagugaggucuauagacau

SEQ ID NO: 20278 - RNA, 37 nt, Artificial Sequence
  Description of Artificial Sequence:  Enzymatic Nucleic Acid
aacagaaggccgaaaggcgagugaggucuaauaaaug

SEQ ID NO: 20279 - RNA, 37 nt, Artificial Sequence
  Description of Artificial Sequence:  Enzymatic Nucleic Acid
gucacuaagccgaaaggcgagugaggucuagaagcaa

SEQ ID NO: 20280 - RNA, 37 nt, Artificial Sequence
  Description of Artificial Sequence:  Enzymatic Nucleic Acid
guuggucagccgaaaggcgagugaggucuuaacagaa

SEQ ID NO: 20281 - RNA, 37 nt, Artificial Sequence
  Description of Artificial Sequence:  Enzymatic Nucleic Acid
guacacgagccgaaaggcgagugaggucuuccauguu

SEQ ID NO: 20282 - RNA, 37 nt, Artificial Sequence
  Description of Artificial Sequence:  Enzymatic Nucleic Acid
aauguacagccgaaaggcgagugaggucugacuccau

SEQ ID NO: 20283 - RNA, 37 nt, Artificial Sequence
  Description of Artificial Sequence:  Enzymatic Nucleic Acid
guaauguagccgaaaggcgagugaggucuacgacucc

SEQ ID NO: 20284 - RNA, 37 nt, Artificial Sequence
  Description of Artificial Sequence:  Enzymatic Nucleic Acid
aaucaccagccgaaaggcgagugaggucuaguuuugu

SEQ ID NO: 20285 - RNA, 37 nt, Artificial Sequence
  Description of Artificial Sequence:  Enzymatic Nucleic Acid
uggaaucagccgaaaggcgagugaggucucacaguuu

SEQ ID NO: 20286 - RNA, 37 nt, Artificial Sequence
  Description of Artificial Sequence:  Enzymatic Nucleic Acid
acccgagagccgaaaggcgagugaggucuauggaauc

SEQ ID NO: 20287 - RNA, 37 nt, Artificial Sequence
  Description of Artificial Sequence:  Enzymatic Nucleic Acid
gaaauggagccgaaaggcgagugaggucuccgagaca

SEQ ID NO: 20288 - RNA, 37 nt, Artificial Sequence
  Description of Artificial Sequence:  Enzymatic Nucleic Acid
aagugacagccgaaaggcgagugaggucuguugagau

SEQ ID NO: 20289 - RNA, 37 nt, Artificial Sequence
  Description of Artificial Sequence:  Enzymatic Nucleic Acid
caaagugagccgaaaggcgagugaggucuacguugag

SEQ ID NO: 20290 - RNA, 37 nt, Artificial Sequence
  Description of Artificial Sequence:  Enzymatic Nucleic Acid
aucuugcagccgaaaggcgagugaggucuaaagugac

SEQ ID NO: 20291 - RNA, 37 nt, Artificial Sequence
  Description of Artificial Sequence:  Enzymatic Nucleic Acid
guaucuuggccgaaaggcgagugaggucuacaaagug

SEQ ID NO: 20292 - RNA, 37 nt, Artificial Sequence
  Description of Artificial Sequence:  Enzymatic Nucleic Acid
aucaggaagccgaaaggcgagugaggucuaaaucucu

SEQ ID NO: 20293 - RNA, 37 nt, Artificial Sequence
  Description of Artificial Sequence:  Enzymatic Nucleic Acid
uucuguuagccgaaaggcgagugaggucucaucagga

SEQ ID NO: 20294 - RNA, 37 nt, Artificial Sequence
  Description of Artificial Sequence:  Enzymatic Nucleic Acid
ccuucuuggccgaaaggcgagugaggucuugucccag

SEQ ID NO: 20295 - RNA, 37 nt, Artificial Sequence
  Description of Artificial Sequence:  Enzymatic Nucleic Acid
uaguaaaggccgaaaggcgagugaggucuccuucuug

SEQ ID NO: 20296 - RNA, 37 nt, Artificial Sequence
  Description of Artificial Sequence:  Enzymatic Nucleic Acid
ucauguaggccgaaaggcgagugaggucuugggaaua

SEQ ID NO: 20297 - RNA, 37 nt, Artificial Sequence
  Description of Artificial Sequence:  Enzymatic Nucleic Acid
cagcauaggccgaaaggcgagugaggucuugaucaug

SEQ ID NO: 20298 - RNA, 37 nt, Artificial Sequence
  Description of Artificial Sequence:  Enzymatic Nucleic Acid
caugccaggccgaaaggcgagugaggucuauagcuga

SEQ ID NO: 20299 - RNA, 37 nt, Artificial Sequence
  Description of Artificial Sequence:  Enzymatic Nucleic Acid
agaccauggccgaaaggcgagugaggucucagcauag

SEQ ID NO: 20300 - RNA, 37 nt, Artificial Sequence
  Description of Artificial Sequence:  Enzymatic Nucleic Acid
acagaagagccgaaaggcgagugaggucucaugccag

SEQ ID NO: 20301 - RNA, 37 nt, Artificial Sequence
  Description of Artificial Sequence:  Enzymatic Nucleic Acid
uugcuucagccgaaaggcgagugaggucuagaagacc

SEQ ID NO: 20302 - RNA, 37 nt, Artificial Sequence
  Description of Artificial Sequence:  Enzymatic Nucleic Acid
aauuuuuggccgaaaggcgagugaggucuuucacaga

SEQ ID NO: 20303 - RNA, 37 nt, Artificial Sequence
  Description of Artificial Sequence:  Enzymatic Nucleic Acid
acugguaagccgaaaggcgagugaggucuuuucauca

SEQ ID NO: 20304 - RNA, 37 nt, Artificial Sequence
  Description of Artificial Sequence:  Enzymatic Nucleic Acid
auaauagagccgaaaggcgagugaggucuugguaacu

SEQ ID NO: 20305 - RNA, 37 nt, Artificial Sequence
  Description of Artificial Sequence:  Enzymatic Nucleic Acid
acuauguagccgaaaggcgagugaggucuauaauaga

SEQ ID NO: 20306 - RNA, 37 nt, Artificial Sequence
  Description of Artificial Sequence:  Enzymatic Nucleic Acid
aacgacaagccgaaaggcgagugaggucuuauguaca

SEQ ID NO: 20307 - RNA, 37 nt, Artificial Sequence
  Description of Artificial Sequence:  Enzymatic Nucleic Acid
uacaacgagccgaaaggcgagugaggucuaacuaugu

SEQ ID NO: 20308 - RNA, 37 nt, Artificial Sequence
  Description of Artificial Sequence:  Enzymatic Nucleic Acid
cccuacaagccgaaaggcgagugaggucugacaacua

SEQ ID NO: 20309 - RNA, 37 nt, Artificial Sequence
  Description of Artificial Sequence:  Enzymatic Nucleic Acid
auacccuagccgaaaggcgagugaggucuaacgacaa

SEQ ID NO: 20310 - RNA, 37 nt, Artificial Sequence
  Description of Artificial Sequence:  Enzymatic Nucleic Acid
auccuauagccgaaaggcgagugaggucuccuacaac

SEQ ID NO: 20311 - RNA, 37 nt, Artificial Sequence
  Description of Artificial Sequence:  Enzymatic Nucleic Acid
cagaaccagccgaaaggcgagugaggucuaucauaaa

SEQ ID NO: 20312 - RNA, 37 nt, Artificial Sequence
  Description of Artificial Sequence:  Enzymatic Nucleic Acid
acucagaagccgaaaggcgagugaggucucacaucau

SEQ ID NO: 20313 - RNA, 37 nt, Artificial Sequence
  Description of Artificial Sequence:  Enzymatic Nucleic Acid
gagacggagccgaaaggcgagugaggucuucagaacc

SEQ ID NO: 20314 - RNA, 37 nt, Artificial Sequence
  Description of Artificial Sequence:  Enzymatic Nucleic Acid
ccaugagagccgaaaggcgagugaggucuggacucag

SEQ ID NO: 20315 - RNA, 37 nt, Artificial Sequence
  Description of Artificial Sequence:  Enzymatic Nucleic Acid
uucuccaagccgaaaggcgagugaggucuagauaguu

SEQ ID NO: 20316 - RNA, 37 nt, Artificial Sequence
  Description of Artificial Sequence:  Enzymatic Nucleic Acid
aagacaaggccgaaaggcgagugaggucuuuuucucc

SEQ ID NO: 20317 - RNA, 37 nt, Artificial Sequence
  Description of Artificial Sequence:  Enzymatic Nucleic Acid
auuuaagagccgaaaggcgagugaggucuaagcuuuu

SEQ ID NO: 20318 - RNA, 37 nt, Artificial Sequence
  Description of Artificial Sequence:  Enzymatic Nucleic Acid
uugcuguagccgaaaggcgagugaggucuaauuuaag

SEQ ID NO: 20319 - RNA, 37 nt, Artificial Sequence
  Description of Artificial Sequence:  Enzymatic Nucleic Acid
aguucuuggccgaaaggcgagugaggucuuguacaau

SEQ ID NO: 20320 - RNA, 37 nt, Artificial Sequence
  Description of Artificial Sequence:  Enzymatic Nucleic Acid
aauccccagccgaaaggcgagugaggucuauuuaguu

SEQ ID NO: 20321 - RNA, 37 nt, Artificial Sequence
  Description of Artificial Sequence:  Enzymatic Nucleic Acid
ugcugauggccgaaaggcgagugaggucuuucgaaga

SEQ ID NO: 20322 - RNA, 37 nt, Artificial Sequence
  Description of Artificial Sequence:  Enzymatic Nucleic Acid
uucuuauggccgaaaggcgagugaggucuugaugcuu

SEQ ID NO: 20323 - RNA, 37 nt, Artificial Sequence
  Description of Artificial Sequence:  Enzymatic Nucleic Acid
ucgguuuagccgaaaggcgagugaggucuaaguuucu

SEQ ID NO: 20324 - RNA, 37 nt, Artificial Sequence
  Description of Artificial Sequence:  Enzymatic Nucleic Acid
cucccagagccgaaaggcgagugaggucuuggguuuu

SEQ ID NO: 20325 - RNA, 37 nt, Artificial Sequence
  Description of Artificial Sequence:  Enzymatic Nucleic Acid
ucaucucagccgaaaggcgagugaggucuucccagac

SEQ ID NO: 20326 - RNA, 37 nt, Artificial Sequence
  Description of Artificial Sequence:  Enzymatic Nucleic Acid
uuaagguggccgaaaggcgagugaggucuucaaaaau

SEQ ID NO: 20327 - RNA, 37 nt, Artificial Sequence
  Description of Artificial Sequence:  Enzymatic Nucleic Acid
ggguuacagccgaaaggcgagugaggucucaucuaua

SEQ ID NO: 20328 - RNA, 37 nt, Artificial Sequence
  Description of Artificial Sequence:  Enzymatic Nucleic Acid
ccggguuagccgaaaggcgagugaggucuaccaucua

SEQ ID NO: 20329 - RNA, 37 nt, Artificial Sequence
  Description of Artificial Sequence:  Enzymatic Nucleic Acid
cuuggucagccgaaaggcgagugaggucuuccggguu

SEQ ID NO: 20330 - RNA, 37 nt, Artificial Sequence
  Description of Artificial Sequence:  Enzymatic Nucleic Acid
cagguguagccgaaaggcgagugaggucuaauccuug

SEQ ID NO: 20331 - RNA, 37 nt, Artificial Sequence
  Description of Artificial Sequence:  Enzymatic Nucleic Acid
augcugcagccgaaaggcgagugaggucuagguguac

SEQ ID NO: 20332 - RNA, 37 nt, Artificial Sequence
  Description of Artificial Sequence:  Enzymatic Nucleic Acid
ggaugcuggccgaaaggcgagugaggucuacaggugu

SEQ ID NO: 20333 - RNA, 37 nt, Artificial Sequence
  Description of Artificial Sequence:  Enzymatic Nucleic Acid
acuggauggccgaaaggcgagugaggucuugcacagg

SEQ ID NO: 20334 - RNA, 37 nt, Artificial Sequence
  Description of Artificial Sequence:  Enzymatic Nucleic Acid
ucagcccagccgaaaggcgagugaggucuuggaugcu

SEQ ID NO: 20335 - RNA, 37 nt, Artificial Sequence
  Description of Artificial Sequence:  Enzymatic Nucleic Acid
gucaucaggccgaaaggcgagugaggucuccacugga

SEQ ID NO: 20336 - RNA, 37 nt, Artificial Sequence
  Description of Artificial Sequence:  Enzymatic Nucleic Acid
caaauguggccgaaaggcgagugaggucuuguucuuc

SEQ ID NO: 20337 - RNA, 37 nt, Artificial Sequence
  Description of Artificial Sequence:  Enzymatic Nucleic Acid
gacccugagccgaaaggcgagugaggucuaaaugugc

SEQ ID NO: 20338 - RNA, 37 nt, Artificial Sequence
  Description of Artificial Sequence:  Enzymatic Nucleic Acid
uucauggagccgaaaggcgagugaggucuccugacaa

SEQ ID NO: 20339 - RNA, 37 nt, Artificial Sequence
  Description of Artificial Sequence:  Enzymatic Nucleic Acid
aaaagcaagccgaaaggcgagugaggucuaaaagguu

SEQ ID NO: 20340 - RNA, 37 nt, Artificial Sequence
  Description of Artificial Sequence:  Enzymatic Nucleic Acid
uccaaaaggccgaaaggcgagugaggucuaacaaaag

SEQ ID NO: 20341 - RNA, 37 nt, Artificial Sequence
  Description of Artificial Sequence:  Enzymatic Nucleic Acid
ccaugccagccgaaaggcgagugaggucuuuccaaaa

SEQ ID NO: 20342 - RNA, 37 nt, Artificial Sequence
  Description of Artificial Sequence:  Enzymatic Nucleic Acid
auuccauggccgaaaggcgagugaggucucacuucca

SEQ ID NO: 20343 - RNA, 37 nt, Artificial Sequence
  Description of Artificial Sequence:  Enzymatic Nucleic Acid
ggcuuccagccgaaaggcgagugaggucucagagauu

SEQ ID NO: 20344 - RNA, 37 nt, Artificial Sequence
  Description of Artificial Sequence:  Enzymatic Nucleic Acid
caccgugggccgaaaggcgagugaggucuuuccacca

SEQ ID NO: 20345 - RNA, 37 nt, Artificial Sequence
  Description of Artificial Sequence:  Enzymatic Nucleic Acid
cucccccagccgaaaggcgagugaggucucguggcuu

SEQ ID NO: 20346 - RNA, 37 nt, Artificial Sequence
  Description of Artificial Sequence:  Enzymatic Nucleic Acid
cugacacggccgaaaggcgagugaggucuucccccac

SEQ ID NO: 20347 - RNA, 37 nt, Artificial Sequence
  Description of Artificial Sequence:  Enzymatic Nucleic Acid
uucugacagccgaaaggcgagugaggucugcuccccc

SEQ ID NO: 20348 - RNA, 37 nt, Artificial Sequence
  Description of Artificial Sequence:  Enzymatic Nucleic Acid
gauucugagccgaaaggcgagugaggucuacgcuccc

SEQ ID NO: 20349 - RNA, 37 nt, Artificial Sequence
  Description of Artificial Sequence:  Enzymatic Nucleic Acid
guacuucggccgaaaggcgagugaggucuagggauuc

SEQ ID NO: 20350 - RNA, 37 nt, Artificial Sequence
  Description of Artificial Sequence:  Enzymatic Nucleic Acid
ccaagguagccgaaaggcgagugaggucuuucgcagg

SEQ ID NO: 20351 - RNA, 37 nt, Artificial Sequence
  Description of Artificial Sequence:  Enzymatic Nucleic Acid
guggguaagccgaaaggcgagugaggucucaagguac

SEQ ID NO: 20352 - RNA, 37 nt, Artificial Sequence
  Description of Artificial Sequence:  Enzymatic Nucleic Acid
uuuuuauagccgaaaggcgagugaggucucauuuuau

SEQ ID NO: 20353 - RNA, 37 nt, Artificial Sequence
  Description of Artificial Sequence:  Enzymatic Nucleic Acid
ugauuggagccgaaaggcgagugaggucuucaagggg

SEQ ID NO: 20354 - RNA, 37 nt, Artificial Sequence
  Description of Artificial Sequence:  Enzymatic Nucleic Acid
augccccggccgaaaggcgagugaggucuuuuaauug

SEQ ID NO: 20355 - RNA, 37 nt, Artificial Sequence
  Description of Artificial Sequence:  Enzymatic Nucleic Acid
aguacauggccgaaaggcgagugaggucucccgcuuu

SEQ ID NO: 20356 - RNA, 37 nt, Artificial Sequence
  Description of Artificial Sequence:  Enzymatic Nucleic Acid
cgucaguagccgaaaggcgagugaggucuaugccccg

SEQ ID NO: 20357 - RNA, 37 nt, Artificial Sequence
  Description of Artificial Sequence:  Enzymatic Nucleic Acid
uucacucagccgaaaggcgagugaggucuuuccauaa

SEQ ID NO: 20358 - RNA, 37 nt, Artificial Sequence
  Description of Artificial Sequence:  Enzymatic Nucleic Acid
cucuuucagccgaaaggcgagugaggucuucacuucc

SEQ ID NO: 20359 - RNA, 37 nt, Artificial Sequence
  Description of Artificial Sequence:  Enzymatic Nucleic Acid
aaggaugagccgaaaggcgagugaggucuaguguaau

SEQ ID NO: 20360 - RNA, 37 nt, Artificial Sequence
  Description of Artificial Sequence:  Enzymatic Nucleic Acid
uggcucuggccgaaaggcgagugaggucuuucuccuu

SEQ ID NO: 20361 - RNA, 37 nt, Artificial Sequence
  Description of Artificial Sequence:  Enzymatic Nucleic Acid
ccacaugggccgaaaggcgagugaggucuucugcuuc

SEQ ID NO: 20362 - RNA, 37 nt, Artificial Sequence
  Description of Artificial Sequence:  Enzymatic Nucleic Acid
agagaccagccgaaaggcgagugaggucuauggcucu

SEQ ID NO: 20363 - RNA, 37 nt, Artificial Sequence
  Description of Artificial Sequence:  Enzymatic Nucleic Acid
cagagagagccgaaaggcgagugaggucucacauggc

SEQ ID NO: 20364 - RNA, 37 nt, Artificial Sequence
  Description of Artificial Sequence:  Enzymatic Nucleic Acid
auacacaagccgaaaggcgagugaggucucagagaga

SEQ ID NO: 20365 - RNA, 37 nt, Artificial Sequence
  Description of Artificial Sequence:  Enzymatic Nucleic Acid
gacauacagccgaaaggcgagugaggucuaaccagag

SEQ ID NO: 20366 - RNA, 37 nt, Artificial Sequence
  Description of Artificial Sequence:  Enzymatic Nucleic Acid
gggacauagccgaaaggcgagugaggucuacaaccag

SEQ ID NO: 20367 - RNA, 37 nt, Artificial Sequence
  Description of Artificial Sequence:  Enzymatic Nucleic Acid
gggugggagccgaaaggcgagugaggucuauacacaa

SEQ ID NO: 20368 - RNA, 37 nt, Artificial Sequence
  Description of Artificial Sequence:  Enzymatic Nucleic Acid
auuucucagccgaaaggcgagugaggucucaaucugg

SEQ ID NO: 20369 - RNA, 37 nt, Artificial Sequence
  Description of Artificial Sequence:  Enzymatic Nucleic Acid
ggaauccagccgaaaggcgagugaggucuaggagaga

SEQ ID NO: 20370 - RNA, 37 nt, Artificial Sequence
  Description of Artificial Sequence:  Enzymatic Nucleic Acid
gugccguagccgaaaggcgagugaggucuugguagga

SEQ ID NO: 20371 - RNA, 37 nt, Artificial Sequence
  Description of Artificial Sequence:  Enzymatic Nucleic Acid
gagugguggccgaaaggcgagugaggucucguacugg

SEQ ID NO: 20372 - RNA, 37 nt, Artificial Sequence
  Description of Artificial Sequence:  Enzymatic Nucleic Acid
caugucaggccgaaaggcgagugaggucuguuugagu

SEQ ID NO: 20373 - RNA, 37 nt, Artificial Sequence
  Description of Artificial Sequence:  Enzymatic Nucleic Acid
agaccguagccgaaaggcgagugaggucuaugucagc

SEQ ID NO: 20374 - RNA, 37 nt, Artificial Sequence
  Description of Artificial Sequence:  Enzymatic Nucleic Acid
ggcauagagccgaaaggcgagugaggucucguacaug

SEQ ID NO: 20375 - RNA, 37 nt, Artificial Sequence
  Description of Artificial Sequence:  Enzymatic Nucleic Acid
aggaaugggccgaaaggcgagugaggucuauagaccg

SEQ ID NO: 20376 - RNA, 37 nt, Artificial Sequence
  Description of Artificial Sequence:  Enzymatic Nucleic Acid
augugauggccgaaaggcgagugaggucugggggagg

SEQ ID NO: 20377 - RNA, 37 nt, Artificial Sequence
  Description of Artificial Sequence:  Enzymatic Nucleic Acid
ugccaauagccgaaaggcgagugaggucucaguggau

SEQ ID NO: 20378 - RNA, 37 nt, Artificial Sequence
  Description of Artificial Sequence:  Enzymatic Nucleic Acid
uccaacuggccgaaaggcgagugaggucucaauacca

SEQ ID NO: 20379 - RNA, 37 nt, Artificial Sequence
  Description of Artificial Sequence:  Enzymatic Nucleic Acid
uccuccaagccgaaaggcgagugaggucuugccaaua

SEQ ID NO: 20380 - RNA, 37 nt, Artificial Sequence
  Description of Artificial Sequence:  Enzymatic Nucleic Acid
uuggcgcagccgaaaggcgagugaggucuucuuccuc

SEQ ID NO: 20381 - RNA, 37 nt, Artificial Sequence
  Description of Artificial Sequence:  Enzymatic Nucleic Acid
cguuggcggccgaaaggcgagugaggucuacucuucc

SEQ ID NO: 20382 - RNA, 37 nt, Artificial Sequence
  Description of Artificial Sequence:  Enzymatic Nucleic Acid
cucguugggccgaaaggcgagugaggucugcacucuu

SEQ ID NO: 20383 - RNA, 37 nt, Artificial Sequence
  Description of Artificial Sequence:  Enzymatic Nucleic Acid
uggcuggggccgaaaggcgagugaggucuucguuggc

SEQ ID NO: 20384 - RNA, 37 nt, Artificial Sequence
  Description of Artificial Sequence:  Enzymatic Nucleic Acid
cagcuugggccgaaaggcgagugaggucuugggcucg

SEQ ID NO: 20385 - RNA, 37 nt, Artificial Sequence
  Description of Artificial Sequence:  Enzymatic Nucleic Acid
ugagacaggccgaaaggcgagugaggucuuuggcugg

SEQ ID NO: 20386 - RNA, 37 nt, Artificial Sequence
  Description of Artificial Sequence:  Enzymatic Nucleic Acid
cacugagagccgaaaggcgagugaggucuagcuuggc

SEQ ID NO: 20387 - RNA, 37 nt, Artificial Sequence
  Description of Artificial Sequence:  Enzymatic Nucleic Acid
guuugucagccgaaaggcgagugaggucuugagacag

SEQ ID NO: 20388 - RNA, 37 nt, Artificial Sequence
  Description of Artificial Sequence:  Enzymatic Nucleic Acid
auucuucagccgaaaggcgagugaggucuaaggguau

SEQ ID NO: 20389 - RNA, 37 nt, Artificial Sequence
  Description of Artificial Sequence:  Enzymatic Nucleic Acid
ccuccacagccgaaaggcgagugaggucuuucuccau

SEQ ID NO: 20390 - RNA, 37 nt, Artificial Sequence
  Description of Artificial Sequence:  Enzymatic Nucleic Acid
guccuccagccgaaaggcgagugaggucuacuucucc

SEQ ID NO: 20391 - RNA, 37 nt, Artificial Sequence
  Description of Artificial Sequence:  Enzymatic Nucleic Acid
uuuauuaagccgaaaggcgagugaggucuuucaauuu

SEQ ID NO: 20392 - RNA, 37 nt, Artificial Sequence
  Description of Artificial Sequence:  Enzymatic Nucleic Acid
aauuagaggccgaaaggcgagugaggucuaaauugau

SEQ ID NO: 20393 - RNA, 37 nt, Artificial Sequence
  Description of Artificial Sequence:  Enzymatic Nucleic Acid
gguacuuagccgaaaggcgagugaggucuaguuuugu

SEQ ID NO: 20394 - RNA, 37 nt, Artificial Sequence
  Description of Artificial Sequence:  Enzymatic Nucleic Acid
caaggguagccgaaaggcgagugaggucuuuacaguu

SEQ ID NO: 20395 - RNA, 37 nt, Artificial Sequence
  Description of Artificial Sequence:  Enzymatic Nucleic Acid
uuggauaagccgaaaggcgagugaggucuaaggguac

SEQ ID NO: 20396 - RNA, 37 nt, Artificial Sequence
  Description of Artificial Sequence:  Enzymatic Nucleic Acid
auuugccggccgaaaggcgagugaggucuuuggauaa

SEQ ID NO: 20397 - RNA, 37 nt, Artificial Sequence
  Description of Artificial Sequence:  Enzymatic Nucleic Acid
cacauuuggccgaaaggcgagugaggucucgcuugga

SEQ ID NO: 20398 - RNA, 37 nt, Artificial Sequence
  Description of Artificial Sequence:  Enzymatic Nucleic Acid
agcugacagccgaaaggcgagugaggucuauuugccg

SEQ ID NO: 20399 - RNA, 37 nt, Artificial Sequence
  Description of Artificial Sequence:  Enzymatic Nucleic Acid
aaagcugagccgaaaggcgagugaggucuacauuugc

SEQ ID NO: 20400 - RNA, 37 nt, Artificial Sequence
  Description of Artificial Sequence:  Enzymatic Nucleic Acid
guacaaaggccgaaaggcgagugaggucuugacacau

SEQ ID NO: 20401 - RNA, 37 nt, Artificial Sequence
  Description of Artificial Sequence:  Enzymatic Nucleic Acid
cauuuguagccgaaaggcgagugaggucuaaagcuga

SEQ ID NO: 20402 - RNA, 37 nt, Artificial Sequence
  Description of Artificial Sequence:  Enzymatic Nucleic Acid
ccgcuucagccgaaaggcgagugaggucuauuuguac

SEQ ID NO: 20403 - RNA, 37 nt, Artificial Sequence
  Description of Artificial Sequence:  Enzymatic Nucleic Acid
guugaccggccgaaaggcgagugaggucuuucacauu

SEQ ID NO: 20404 - RNA, 37 nt, Artificial Sequence
  Description of Artificial Sequence:  Enzymatic Nucleic Acid
uuuguugagccgaaaggcgagugaggucucgcuucac

SEQ ID NO: 20405 - RNA, 37 nt, Artificial Sequence
  Description of Artificial Sequence:  Enzymatic Nucleic Acid
ucucccgagccgaaaggcgagugaggucuuuuguuga

SEQ ID NO: 20406 - RNA, 37 nt, Artificial Sequence
  Description of Artificial Sequence:  Enzymatic Nucleic Acid
ggagaucagccgaaaggcgagugaggucuccucucuc

SEQ ID NO: 20407 - RNA, 37 nt, Artificial Sequence
  Description of Artificial Sequence:  Enzymatic Nucleic Acid
ccuggucagccgaaaggcgagugaggucuguggaagg

SEQ ID NO: 20408 - RNA, 37 nt, Artificial Sequence
  Description of Artificial Sequence:  Enzymatic Nucleic Acid
uuucaggagccgaaaggcgagugaggucucccugguc

SEQ ID NO: 20409 - RNA, 37 nt, Artificial Sequence
  Description of Artificial Sequence:  Enzymatic Nucleic Acid
ucagguuggccgaaaggcgagugaggucuaaaguaau

SEQ ID NO: 20410 - RNA, 37 nt, Artificial Sequence
  Description of Artificial Sequence:  Enzymatic Nucleic Acid
gugggcuggccgaaaggcgagugaggucuaugucagg

SEQ ID NO: 20411 - RNA, 37 nt, Artificial Sequence
  Description of Artificial Sequence:  Enzymatic Nucleic Acid
ucaguggggccgaaaggcgagugaggucuugcauguc

SEQ ID NO: 20412 - RNA, 37 nt, Artificial Sequence
  Description of Artificial Sequence:  Enzymatic Nucleic Acid
cucuccuggccgaaaggcgagugaggucuucaguggg

SEQ ID NO: 20413 - RNA, 37 nt, Artificial Sequence
  Description of Artificial Sequence:  Enzymatic Nucleic Acid
aagacacggccgaaaggcgagugaggucuucuccugc

SEQ ID NO: 20414 - RNA, 37 nt, Artificial Sequence
  Description of Artificial Sequence:  Enzymatic Nucleic Acid
caaagacagccgaaaggcgagugaggucugcucuccu

SEQ ID NO: 20415 - RNA, 37 nt, Artificial Sequence
  Description of Artificial Sequence:  Enzymatic Nucleic Acid
cacaaagagccgaaaggcgagugaggucuacgcucuc

SEQ ID NO: 20416 - RNA, 37 nt, Artificial Sequence
  Description of Artificial Sequence:  Enzymatic Nucleic Acid
gugcaccagccgaaaggcgagugaggucuaaagacac

SEQ ID NO: 20417 - RNA, 37 nt, Artificial Sequence
  Description of Artificial Sequence:  Enzymatic Nucleic Acid
gcagugcagccgaaaggcgagugaggucucacaaaga

SEQ ID NO: 20418 - RNA, 37 nt, Artificial Sequence
  Description of Artificial Sequence:  Enzymatic Nucleic Acid
cugcaguggccgaaaggcgagugaggucuaccacaaa

SEQ ID NO: 20419 - RNA, 37 nt, Artificial Sequence
  Description of Artificial Sequence:  Enzymatic Nucleic Acid
ucugucuggccgaaaggcgagugaggucuagugcacc

SEQ ID NO: 20420 - RNA, 37 nt, Artificial Sequence
  Description of Artificial Sequence:  Enzymatic Nucleic Acid
uucucaaagccgaaaggcgagugaggucuguagaucu

SEQ ID NO: 20421 - RNA, 37 nt, Artificial Sequence
  Description of Artificial Sequence:  Enzymatic Nucleic Acid
agcuuguagccgaaaggcgagugaggucucaugugag

SEQ ID NO: 20422 - RNA, 37 nt, Artificial Sequence
  Description of Artificial Sequence:  Enzymatic Nucleic Acid
gggccaaggccgaaaggcgagugaggucuuuguacca

SEQ ID NO: 20423 - RNA, 37 nt, Artificial Sequence
  Description of Artificial Sequence:  Enzymatic Nucleic Acid
gcuguggggccgaaaggcgagugaggucucaagcuug

SEQ ID NO: 20424 - RNA, 37 nt, Artificial Sequence
  Description of Artificial Sequence:  Enzymatic Nucleic Acid
ggcagagggccgaaaggcgagugaggucuugugggcc

SEQ ID NO: 20425 - RNA, 37 nt, Artificial Sequence
  Description of Artificial Sequence:  Enzymatic Nucleic Acid
uggauugggccgaaaggcgagugaggucuagaggcug

SEQ ID NO: 20426 - RNA, 37 nt, Artificial Sequence
  Description of Artificial Sequence:  Enzymatic Nucleic Acid
cucucccagccgaaaggcgagugaggucuauggauug

SEQ ID NO: 20427 - RNA, 37 nt, Artificial Sequence
  Description of Artificial Sequence:  Enzymatic Nucleic Acid
gugggcaagccgaaaggcgagugaggucuucucccac

SEQ ID NO: 20428 - RNA, 37 nt, Artificial Sequence
  Description of Artificial Sequence:  Enzymatic Nucleic Acid
gguguggggccgaaaggcgagugaggucuaacucucc

SEQ ID NO: 20429 - RNA, 37 nt, Artificial Sequence
  Description of Artificial Sequence:  Enzymatic Nucleic Acid
cuugcaaagccgaaaggcgagugaggucuaggugugg

SEQ ID NO: 20430 - RNA, 37 nt, Artificial Sequence
  Description of Artificial Sequence:  Enzymatic Nucleic Acid
aguucuuggccgaaaggcgagugaggucuaaacaggu

SEQ ID NO: 20431 - RNA, 37 nt, Artificial Sequence
  Description of Artificial Sequence:  Enzymatic Nucleic Acid
cauggugggccgaaaggcgagugaggucuauucaauu

SEQ ID NO: 20432 - RNA, 37 nt, Artificial Sequence
  Description of Artificial Sequence:  Enzymatic Nucleic Acid
uuagagaagccgaaaggcgagugaggucuaugguggc

SEQ ID NO: 20433 - RNA, 37 nt, Artificial Sequence
  Description of Artificial Sequence:  Enzymatic Nucleic Acid
cauuuguggccgaaaggcgagugaggucuuauuagag

SEQ ID NO: 20434 - RNA, 37 nt, Artificial Sequence
  Description of Artificial Sequence:  Enzymatic Nucleic Acid
uucuuaaggccgaaaggcgagugaggucuuccaugau

SEQ ID NO: 20435 - RNA, 37 nt, Artificial Sequence
  Description of Artificial Sequence:  Enzymatic Nucleic Acid
caaggauggccgaaaggcgagugaggucuauucuuaa

SEQ ID NO: 20436 - RNA, 37 nt, Artificial Sequence
  Description of Artificial Sequence:  Enzymatic Nucleic Acid
ugguccuggccgaaaggcgagugaggucuaaggaugc

SEQ ID NO: 20437 - RNA, 37 nt, Artificial Sequence
  Description of Artificial Sequence:  Enzymatic Nucleic Acid
aaggcagagccgaaaggcgagugaggucuauagucuc

SEQ ID NO: 20438 - RNA, 37 nt, Artificial Sequence
  Description of Artificial Sequence:  Enzymatic Nucleic Acid
gagcaagggccgaaaggcgagugaggucuagacauag

SEQ ID NO: 20439 - RNA, 37 nt, Artificial Sequence
  Description of Artificial Sequence:  Enzymatic Nucleic Acid
gucuugaggccgaaaggcgagugaggucuaaggcaga

SEQ ID NO: 20440 - RNA, 37 nt, Artificial Sequence
  Description of Artificial Sequence:  Enzymatic Nucleic Acid
ugaccacggccgaaaggcgagugaggucuaaugucuu

SEQ ID NO: 20441 - RNA, 37 nt, Artificial Sequence
  Description of Artificial Sequence:  Enzymatic Nucleic Acid
ccugaccagccgaaaggcgagugaggucugcaauguc

SEQ ID NO: 20442 - RNA, 37 nt, Artificial Sequence
  Description of Artificial Sequence:  Enzymatic Nucleic Acid
cugccugagccgaaaggcgagugaggucucacgcaau

SEQ ID NO: 20443 - RNA, 37 nt, Artificial Sequence
  Description of Artificial Sequence:  Enzymatic Nucleic Acid
gugagcuggccgaaaggcgagugaggucucugaccac

SEQ ID NO: 20444 - RNA, 37 nt, Artificial Sequence
  Description of Artificial Sequence:  Enzymatic Nucleic Acid
acugugaggccgaaaggcgagugaggucuugccugac

SEQ ID NO: 20445 - RNA, 37 nt, Artificial Sequence
  Description of Artificial Sequence:  Enzymatic Nucleic Acid
cucuaggagccgaaaggcgagugaggucuugugagcu

SEQ ID NO: 20446 - RNA, 37 nt, Artificial Sequence
  Description of Artificial Sequence:  Enzymatic Nucleic Acid
gccacacggccgaaaggcgagugaggucuucuaggac

SEQ ID NO: 20447 - RNA, 37 nt, Artificial Sequence
  Description of Artificial Sequence:  Enzymatic Nucleic Acid
gugccacagccgaaaggcgagugaggucugcucuagg

SEQ ID NO: 20448 - RNA, 37 nt, Artificial Sequence
  Description of Artificial Sequence:  Enzymatic Nucleic Acid
gggugccagccgaaaggcgagugaggucuacgcucua

SEQ ID NO: 20449 - RNA, 37 nt, Artificial Sequence
  Description of Artificial Sequence:  Enzymatic Nucleic Acid
cguggguggccgaaaggcgagugaggucucacacgcu

SEQ ID NO: 20450 - RNA, 37 nt, Artificial Sequence
  Description of Artificial Sequence:  Enzymatic Nucleic Acid
ccccaauagccgaaaggcgagugaggucuuugucguc

SEQ ID NO: 20451 - RNA, 37 nt, Artificial Sequence
  Description of Artificial Sequence:  Enzymatic Nucleic Acid
cuucgauggccgaaaggcgagugaggucuuuucccca

SEQ ID NO: 20452 - RNA, 37 nt, Artificial Sequence
  Description of Artificial Sequence:  Enzymatic Nucleic Acid
gcaugagagccgaaaggcgagugaggucuuucgaugc

SEQ ID NO: 20453 - RNA, 37 nt, Artificial Sequence
  Description of Artificial Sequence:  Enzymatic Nucleic Acid
augccguggccgaaaggcgagugaggucuaugagacu

SEQ ID NO: 20454 - RNA, 37 nt, Artificial Sequence
  Description of Artificial Sequence:  Enzymatic Nucleic Acid
cccagauggccgaaaggcgagugaggucucgugcaug

SEQ ID NO: 20455 - RNA, 37 nt, Artificial Sequence
  Description of Artificial Sequence:  Enzymatic Nucleic Acid
uuaaaccagccgaaaggcgagugaggucuaugaucug

SEQ ID NO: 20456 - RNA, 37 nt, Artificial Sequence
  Description of Artificial Sequence:  Enzymatic Nucleic Acid
ucuuuaaagccgaaaggcgagugaggucucacaugau

SEQ ID NO: 20457 - RNA, 37 nt, Artificial Sequence
  Description of Artificial Sequence:  Enzymatic Nucleic Acid
gucuucuagccgaaaggcgagugaggucuaagggucu

SEQ ID NO: 20458 - RNA, 37 nt, Artificial Sequence
  Description of Artificial Sequence:  Enzymatic Nucleic Acid
auacaauggccgaaaggcgagugaggucucugagucu

SEQ ID NO: 20459 - RNA, 37 nt, Artificial Sequence
  Description of Artificial Sequence:  Enzymatic Nucleic Acid
cuucaauagccgaaaggcgagugaggucuaaugccug

SEQ ID NO: 20460 - RNA, 37 nt, Artificial Sequence
  Description of Artificial Sequence:  Enzymatic Nucleic Acid
ucacucuggccgaaaggcgagugaggucuggauagug

SEQ ID NO: 20461 - RNA, 37 nt, Artificial Sequence
  Description of Artificial Sequence:  Enzymatic Nucleic Acid
cuuccucagccgaaaggcgagugaggucuucugcgga

SEQ ID NO: 20462 - RNA, 37 nt, Artificial Sequence
  Description of Artificial Sequence:  Enzymatic Nucleic Acid
uguagagggccgaaaggcgagugaggucucuucgucc

SEQ ID NO: 20463 - RNA, 37 nt, Artificial Sequence
  Description of Artificial Sequence:  Enzymatic Nucleic Acid
augccugggccgaaaggcgagugaggucuagguguag

SEQ ID NO: 20464 - RNA, 37 nt, Artificial Sequence
  Description of Artificial Sequence:  Enzymatic Nucleic Acid
acugcauggccgaaaggcgagugaggucucuggcagg

SEQ ID NO: 20465 - RNA, 37 nt, Artificial Sequence
  Description of Artificial Sequence:  Enzymatic Nucleic Acid
gaacacuggccgaaaggcgagugaggucuaugccugg

SEQ ID NO: 20466 - RNA, 37 nt, Artificial Sequence
  Description of Artificial Sequence:  Enzymatic Nucleic Acid
caagaacagccgaaaggcgagugaggucuugcaugcc

SEQ ID NO: 20467 - RNA, 37 nt, Artificial Sequence
  Description of Artificial Sequence:  Enzymatic Nucleic Acid
gccaagaagccgaaaggcgagugaggucuacugcaug

SEQ ID NO: 20468 - RNA, 37 nt, Artificial Sequence
  Description of Artificial Sequence:  Enzymatic Nucleic Acid
uugcacaggccgaaaggcgagugaggucucaagaaca

SEQ ID NO: 20469 - RNA, 37 nt, Artificial Sequence
  Description of Artificial Sequence:  Enzymatic Nucleic Acid
cuuuugcagccgaaaggcgagugaggucuagccaaga

SEQ ID NO: 20470 - RNA, 37 nt, Artificial Sequence
  Description of Artificial Sequence:  Enzymatic Nucleic Acid
cacuuuuggccgaaaggcgagugaggucuacagccaa

SEQ ID NO: 20471 - RNA, 37 nt, Artificial Sequence
  Description of Artificial Sequence:  Enzymatic Nucleic Acid
ugccuccagccgaaaggcgagugaggucuuuuugcac

SEQ ID NO: 20472 - RNA, 37 nt, Artificial Sequence
  Description of Artificial Sequence:  Enzymatic Nucleic Acid
gaaaaauggccgaaaggcgagugaggucucuccacuu

SEQ ID NO: 20473 - RNA, 37 nt, Artificial Sequence
  Description of Artificial Sequence:  Enzymatic Nucleic Acid
ccugggcagccgaaaggcgagugaggucucuucuauu

SEQ ID NO: 20474 - RNA, 37 nt, Artificial Sequence
  Description of Artificial Sequence:  Enzymatic Nucleic Acid
uuccuggggccgaaaggcgagugaggucuaccuucua

SEQ ID NO: 20475 - RNA, 37 nt, Artificial Sequence
  Description of Artificial Sequence:  Enzymatic Nucleic Acid
cgugccuagccgaaaggcgagugaggucuuagaauaa

SEQ ID NO: 20476 - RNA, 37 nt, Artificial Sequence
  Description of Artificial Sequence:  Enzymatic Nucleic Acid
ccgccguggccgaaaggcgagugaggucucuacuaga

SEQ ID NO: 20477 - RNA, 37 nt, Artificial Sequence
  Description of Artificial Sequence:  Enzymatic Nucleic Acid
aaucaccggccgaaaggcgagugaggucucgugccua

SEQ ID NO: 20478 - RNA, 37 nt, Artificial Sequence
  Description of Artificial Sequence:  Enzymatic Nucleic Acid
ggcaaucagccgaaaggcgagugaggucucgccgugc

SEQ ID NO: 20479 - RNA, 37 nt, Artificial Sequence
  Description of Artificial Sequence:  Enzymatic Nucleic Acid
gaacaugggccgaaaggcgagugaggucuaaucaccg

SEQ ID NO: 20480 - RNA, 37 nt, Artificial Sequence
  Description of Artificial Sequence:  Enzymatic Nucleic Acid
cagaagaagccgaaaggcgagugaggucuauggcaau

SEQ ID NO: 20481 - RNA, 37 nt, Artificial Sequence
  Description of Artificial Sequence:  Enzymatic Nucleic Acid
agaaguaggccgaaaggcgagugaggucucagaagaa

SEQ ID NO: 20482 - RNA, 37 nt, Artificial Sequence
  Description of Artificial Sequence:  Enzymatic Nucleic Acid
gaugaugagccgaaaggcgagugaggucuaagaagua

SEQ ID NO: 20483 - RNA, 37 nt, Artificial Sequence
  Description of Artificial Sequence:  Enzymatic Nucleic Acid
ccgcuuaagccgaaaggcgagugaggucugguccgua

SEQ ID NO: 20484 - RNA, 37 nt, Artificial Sequence
  Description of Artificial Sequence:  Enzymatic Nucleic Acid
uuggcccggccgaaaggcgagugaggucuuuaacggu

SEQ ID NO: 20485 - RNA, 37 nt, Artificial Sequence
  Description of Artificial Sequence:  Enzymatic Nucleic Acid
uccauugggccgaaaggcgagugaggucuccgcuuaa

SEQ ID NO: 20486 - RNA, 37 nt, Artificial Sequence
  Description of Artificial Sequence:  Enzymatic Nucleic Acid
acaaguaggccgaaaggcgagugaggucucugucuuc

SEQ ID NO: 20487 - RNA, 37 nt, Artificial Sequence
  Description of Artificial Sequence:  Enzymatic Nucleic Acid
acgauggagccgaaaggcgagugaggucuaaguagcc

SEQ ID NO: 20488 - RNA, 37 nt, Artificial Sequence
  Description of Artificial Sequence:  Enzymatic Nucleic Acid
auccaugagccgaaaggcgagugaggucugauggaca

SEQ ID NO: 20489 - RNA, 37 nt, Artificial Sequence
  Description of Artificial Sequence:  Enzymatic Nucleic Acid
gucguucagccgaaaggcgagugaggucuaauguuca

SEQ ID NO: 20490 - RNA, 37 nt, Artificial Sequence
  Description of Artificial Sequence:  Enzymatic Nucleic Acid
ucauaagggccgaaaggcgagugaggucuagucguuc

SEQ ID NO: 20491 - RNA, 37 nt, Artificial Sequence
  Description of Artificial Sequence:  Enzymatic Nucleic Acid
uuugcugggccgaaaggcgagugaggucuaucauaag

SEQ ID NO: 20492 - RNA, 37 nt, Artificial Sequence
  Description of Artificial Sequence:  Enzymatic Nucleic Acid
cccauuuggccgaaaggcgagugaggucuuggcauca

SEQ ID NO: 20493 - RNA, 37 nt, Artificial Sequence
  Description of Artificial Sequence:  Enzymatic Nucleic Acid
agcuucaggccgaaaggcgagugaggucucggucucu

SEQ ID NO: 20494 - RNA, 37 nt, Artificial Sequence
  Description of Artificial Sequence:  Enzymatic Nucleic Acid
uuaccuaggccgaaaggcgagugaggucuuucagccg

SEQ ID NO: 20495 - RNA, 37 nt, Artificial Sequence
  Description of Artificial Sequence:  Enzymatic Nucleic Acid
gaggcuuagccgaaaggcgagugaggucucuagcuuc

SEQ ID NO: 20496 - RNA, 37 nt, Artificial Sequence
  Description of Artificial Sequence:  Enzymatic Nucleic Acid
ccaagagggccgaaaggcgagugaggucuuuaccuag

SEQ ID NO: 20497 - RNA, 37 nt, Artificial Sequence
  Description of Artificial Sequence:  Enzymatic Nucleic Acid
caccacgggccgaaaggcgagugaggucucaagaggc

SEQ ID NO: 20498 - RNA, 37 nt, Artificial Sequence
  Description of Artificial Sequence:  Enzymatic Nucleic Acid
aggcaccagccgaaaggcgagugaggucuggccaaga

SEQ ID NO: 20499 - RNA, 37 nt, Artificial Sequence
  Description of Artificial Sequence:  Enzymatic Nucleic Acid
caaaggcagccgaaaggcgagugaggucucacggcca

SEQ ID NO: 20500 - RNA, 37 nt, Artificial Sequence
  Description of Artificial Sequence:  Enzymatic Nucleic Acid
gccaaagggccgaaaggcgagugaggucuaccacggc

SEQ ID NO: 20501 - RNA, 37 nt, Artificial Sequence
  Description of Artificial Sequence:  Enzymatic Nucleic Acid
ucacuugggccgaaaggcgagugaggucucaaaggca

SEQ ID NO: 20502 - RNA, 37 nt, Artificial Sequence
  Description of Artificial Sequence:  Enzymatic Nucleic Acid
uucaaucagccgaaaggcgagugaggucuuuggccaa

SEQ ID NO: 20503 - RNA, 37 nt, Artificial Sequence
  Description of Artificial Sequence:  Enzymatic Nucleic Acid
ggcaucuggccgaaaggcgagugaggucuuucaauca

SEQ ID NO: 20504 - RNA, 37 nt, Artificial Sequence
  Description of Artificial Sequence:  Enzymatic Nucleic Acid
uccaaagggccgaaaggcgagugaggucuaucugcuu

SEQ ID NO: 20505 - RNA, 37 nt, Artificial Sequence
  Description of Artificial Sequence:  Enzymatic Nucleic Acid
gcaaguuggccgaaaggcgagugaggucuugucuugu

SEQ ID NO: 20506 - RNA, 37 nt, Artificial Sequence
  Description of Artificial Sequence:  Enzymatic Nucleic Acid
cuguccuggccgaaaggcgagugaggucuaaguugcu

SEQ ID NO: 20507 - RNA, 37 nt, Artificial Sequence
  Description of Artificial Sequence:  Enzymatic Nucleic Acid
gacugcuagccgaaaggcgagugaggucuuguccugc

SEQ ID NO: 20508 - RNA, 37 nt, Artificial Sequence
  Description of Artificial Sequence:  Enzymatic Nucleic Acid
uuugacuggccgaaaggcgagugaggucuuacugucc

SEQ ID NO: 20509 - RNA, 37 nt, Artificial Sequence
  Description of Artificial Sequence:  Enzymatic Nucleic Acid
cauuuugagccgaaaggcgagugaggucuugcuacug

SEQ ID NO: 20510 - RNA, 37 nt, Artificial Sequence
  Description of Artificial Sequence:  Enzymatic Nucleic Acid
ucuuucaagccgaaaggcgagugaggucuauuuugac

SEQ ID NO: 20511 - RNA, 37 nt, Artificial Sequence
  Description of Artificial Sequence:  Enzymatic Nucleic Acid
guguguuggccgaaaggcgagugaggucuuccuucuu

SEQ ID NO: 20512 - RNA, 37 nt, Artificial Sequence
  Description of Artificial Sequence:  Enzymatic Nucleic Acid
gaugcucagccgaaaggcgagugaggucuuguguguu

SEQ ID NO: 20513 - RNA, 37 nt, Artificial Sequence
  Description of Artificial Sequence:  Enzymatic Nucleic Acid
gcucgauggccgaaaggcgagugaggucuucacugug

SEQ ID NO: 20514 - RNA, 37 nt, Artificial Sequence
  Description of Artificial Sequence:  Enzymatic Nucleic Acid
caugagaggccgaaaggcgagugaggucuucgaugcu

SEQ ID NO: 20515 - RNA, 37 nt, Artificial Sequence
  Description of Artificial Sequence:  Enzymatic Nucleic Acid
aguucagagccgaaaggcgagugaggucuaugagagc

SEQ ID NO: 20516 - RNA, 37 nt, Artificial Sequence
  Description of Artificial Sequence:  Enzymatic Nucleic Acid
gauggugagccgaaaggcgagugaggucucaauauga

SEQ ID NO: 20517 - RNA, 37 nt, Artificial Sequence
  Description of Artificial Sequence:  Enzymatic Nucleic Acid
guugaccagccgaaaggcgagugaggucuauugagau

SEQ ID NO: 20518 - RNA, 37 nt, Artificial Sequence
  Description of Artificial Sequence:  Enzymatic Nucleic Acid
aagguugagccgaaaggcgagugaggucucacauuga

SEQ ID NO: 20519 - RNA, 37 nt, Artificial Sequence
  Description of Artificial Sequence:  Enzymatic Nucleic Acid
uacaggcagccgaaaggcgagugaggucucuagaagg

SEQ ID NO: 20520 - RNA, 37 nt, Artificial Sequence
  Description of Artificial Sequence:  Enzymatic Nucleic Acid
gguacagggccgaaaggcgagugaggucuaccuagaa

SEQ ID NO: 20521 - RNA, 37 nt, Artificial Sequence
  Description of Artificial Sequence:  Enzymatic Nucleic Acid
gcuugguagccgaaaggcgagugaggucuaggcaccu

SEQ ID NO: 20522 - RNA, 37 nt, Artificial Sequence
  Description of Artificial Sequence:  Enzymatic Nucleic Acid
ccuccugggccgaaaggcgagugaggucuuugguaca

SEQ ID NO: 20523 - RNA, 37 nt, Artificial Sequence
  Description of Artificial Sequence:  Enzymatic Nucleic Acid
augagugggccgaaaggcgagugaggucuccuccugg

SEQ ID NO: 20524 - RNA, 37 nt, Artificial Sequence
  Description of Artificial Sequence:  Enzymatic Nucleic Acid
cacaaucagccgaaaggcgagugaggucucaugagug

SEQ ID NO: 20525 - RNA, 37 nt, Artificial Sequence
  Description of Artificial Sequence:  Enzymatic Nucleic Acid
gaauuccagccgaaaggcgagugaggucuaaucacca

SEQ ID NO: 20526 - RNA, 37 nt, Artificial Sequence
  Description of Artificial Sequence:  Enzymatic Nucleic Acid
caaauuuggccgaaaggcgagugaggucuagaauucc

SEQ ID NO: 20527 - RNA, 37 nt, Artificial Sequence
  Description of Artificial Sequence:  Enzymatic Nucleic Acid
uaaguggagccgaaaggcgagugaggucuagguuucc

SEQ ID NO: 20528 - RNA, 37 nt, Artificial Sequence
  Description of Artificial Sequence:  Enzymatic Nucleic Acid
uucucuuggccgaaaggcgagugaggucuuccucagg

SEQ ID NO: 20529 - RNA, 37 nt, Artificial Sequence
  Description of Artificial Sequence:  Enzymatic Nucleic Acid
guaggggagccgaaaggcgagugaggucuaaauucau

SEQ ID NO: 20530 - RNA, 37 nt, Artificial Sequence
  Description of Artificial Sequence:  Enzymatic Nucleic Acid
gaaucguggccgaaaggcgagugaggucucccuuugg

SEQ ID NO: 20531 - RNA, 37 nt, Artificial Sequence
  Description of Artificial Sequence:  Enzymatic Nucleic Acid
ucccuugagccgaaaggcgagugaggucuggaaucgu

SEQ ID NO: 20532 - RNA, 37 nt, Artificial Sequence
  Description of Artificial Sequence:  Enzymatic Nucleic Acid
ugcuccaagccgaaaggcgagugaggucuguagucuu

SEQ ID NO: 20533 - RNA, 37 nt, Artificial Sequence
  Description of Artificial Sequence:  Enzymatic Nucleic Acid
agggauuggccgaaaggcgagugaggucuuccaacgu

SEQ ID NO: 20534 - RNA, 37 nt, Artificial Sequence
  Description of Artificial Sequence:  Enzymatic Nucleic Acid
cagauccagccgaaaggcgagugaggucuagggauug

SEQ ID NO: 20535 - RNA, 37 nt, Artificial Sequence
  Description of Artificial Sequence:  Enzymatic Nucleic Acid
uccaagcggccgaaaggcgagugaggucucguuucag

SEQ ID NO: 20536 - RNA, 37 nt, Artificial Sequence
  Description of Artificial Sequence:  Enzymatic Nucleic Acid
uguccaaggccgaaaggcgagugaggucugccguuuc

SEQ ID NO: 20537 - RNA, 37 nt, Artificial Sequence
  Description of Artificial Sequence:  Enzymatic Nucleic Acid
uggugauggccgaaaggcgagugaggucuuguccaag

SEQ ID NO: 20538 - RNA, 37 nt, Artificial Sequence
  Description of Artificial Sequence:  Enzymatic Nucleic Acid
ucuggcuagccgaaaggcgagugaggucuuggugaug

SEQ ID NO: 20539 - RNA, 37 nt, Artificial Sequence
  Description of Artificial Sequence:  Enzymatic Nucleic Acid
agcucugggccgaaaggcgagugaggucuuacuggug

SEQ ID NO: 20540 - RNA, 37 nt, Artificial Sequence
  Description of Artificial Sequence:  Enzymatic Nucleic Acid
uggcugaggccgaaaggcgagugaggucuucuggcua

SEQ ID NO: 20541 - RNA, 37 nt, Artificial Sequence
  Description of Artificial Sequence:  Enzymatic Nucleic Acid
agagcugggccgaaaggcgagugaggucuugagcucu

SEQ ID NO: 20542 - RNA, 37 nt, Artificial Sequence
  Description of Artificial Sequence:  Enzymatic Nucleic Acid
auccagaggccgaaaggcgagugaggucuuggcugag

SEQ ID NO: 20543 - RNA, 37 nt, Artificial Sequence
  Description of Artificial Sequence:  Enzymatic Nucleic Acid
cuccuccagccgaaaggcgagugaggucuaaauccag

SEQ ID NO: 20544 - RNA, 37 nt, Artificial Sequence
  Description of Artificial Sequence:  Enzymatic Nucleic Acid
cugagggagccgaaaggcgagugaggucuuucuccuc

SEQ ID NO: 20545 - RNA, 37 nt, Artificial Sequence
  Description of Artificial Sequence:  Enzymatic Nucleic Acid
cuacaucagccgaaaggcgagugaggucuugagggac

SEQ ID NO: 20546 - RNA, 37 nt, Artificial Sequence
  Description of Artificial Sequence:  Enzymatic Nucleic Acid
uucuucuagccgaaaggcgagugaggucuaucacuga

SEQ ID NO: 20547 - RNA, 37 nt, Artificial Sequence
  Description of Artificial Sequence:  Enzymatic Nucleic Acid
uucaggaggccgaaaggcgagugaggucuuuccucuu

SEQ ID NO: 20548 - RNA, 37 nt, Artificial Sequence
  Description of Artificial Sequence:  Enzymatic Nucleic Acid
uccuuauagccgaaaggcgagugaggucuagaucuuc

SEQ ID NO: 20549 - RNA, 37 nt, Artificial Sequence
  Description of Artificial Sequence:  Enzymatic Nucleic Acid
augagauggccgaaaggcgagugaggucuuccaaggu

SEQ ID NO: 20550 - RNA, 37 nt, Artificial Sequence
  Description of Artificial Sequence:  Enzymatic Nucleic Acid
agcuguaagccgaaaggcgagugaggucuagaugaga

SEQ ID NO: 20551 - RNA, 37 nt, Artificial Sequence
  Description of Artificial Sequence:  Enzymatic Nucleic Acid
cuuggaaggccgaaaggcgagugaggucuuguaacag

SEQ ID NO: 20552 - RNA, 37 nt, Artificial Sequence
  Description of Artificial Sequence:  Enzymatic Nucleic Acid
cuuagccagccgaaaggcgagugaggucuuuggaagc

SEQ ID NO: 20553 - RNA, 37 nt, Artificial Sequence
  Description of Artificial Sequence:  Enzymatic Nucleic Acid
gcccuuaggccgaaaggcgagugaggucucacuugga

SEQ ID NO: 20554 - RNA, 37 nt, Artificial Sequence
  Description of Artificial Sequence:  Enzymatic Nucleic Acid
acuccauggccgaaaggcgagugaggucuccuuagcc

SEQ ID NO: 20555 - RNA, 37 nt, Artificial Sequence
  Description of Artificial Sequence:  Enzymatic Nucleic Acid
gccaagaagccgaaaggcgagugaggucuuccaugcc

SEQ ID NO: 20556 - RNA, 37 nt, Artificial Sequence
  Description of Artificial Sequence:  Enzymatic Nucleic Acid
ucgcgauggccgaaaggcgagugaggucucaagaacu

SEQ ID NO: 20557 - RNA, 37 nt, Artificial Sequence
  Description of Artificial Sequence:  Enzymatic Nucleic Acid
cacuuucggccgaaaggcgagugaggucugaugccaa

SEQ ID NO: 20558 - RNA, 37 nt, Artificial Sequence
  Description of Artificial Sequence:  Enzymatic Nucleic Acid
uggauacagccgaaaggcgagugaggucuuuucgcga

SEQ ID NO: 20559 - RNA, 37 nt, Artificial Sequence
  Description of Artificial Sequence:  Enzymatic Nucleic Acid
uguggauagccgaaaggcgagugaggucuacuuucgc

SEQ ID NO: 20560 - RNA, 37 nt, Artificial Sequence
  Description of Artificial Sequence:  Enzymatic Nucleic Acid
ucgugccggccgaaaggcgagugaggucucagguccc

SEQ ID NO: 20561 - RNA, 37 nt, Artificial Sequence
  Description of Artificial Sequence:  Enzymatic Nucleic Acid
auuucguggccgaaaggcgagugaggucucgccaggu

SEQ ID NO: 20562 - RNA, 37 nt, Artificial Sequence
  Description of Artificial Sequence:  Enzymatic Nucleic Acid
uuuaaccagccgaaaggcgagugaggucuguucuucu

SEQ ID NO: 20563 - RNA, 37 nt, Artificial Sequence
  Description of Artificial Sequence:  Enzymatic Nucleic Acid
gauuuuaagccgaaaggcgagugaggucucacguucu

SEQ ID NO: 20564 - RNA, 37 nt, Artificial Sequence
  Description of Artificial Sequence:  Enzymatic Nucleic Acid
caaagucagccgaaaggcgagugaggucuagauuuua

SEQ ID NO: 20565 - RNA, 37 nt, Artificial Sequence
  Description of Artificial Sequence:  Enzymatic Nucleic Acid
gggccaaggccgaaaggcgagugaggucucaaaguca

SEQ ID NO: 20566 - RNA, 37 nt, Artificial Sequence
  Description of Artificial Sequence:  Enzymatic Nucleic Acid
aucccggggccgaaaggcgagugaggucucaagccaa

SEQ ID NO: 20567 - RNA, 37 nt, Artificial Sequence
  Description of Artificial Sequence:  Enzymatic Nucleic Acid
uuuucugagccgaaaggcgagugaggucuauaaucug

SEQ ID NO: 20568 - RNA, 37 nt, Artificial Sequence
  Description of Artificial Sequence:  Enzymatic Nucleic Acid
gaggcgaggccgaaaggcgagugaggucuaucuccuu

SEQ ID NO: 20569 - RNA, 37 nt, Artificial Sequence
  Description of Artificial Sequence:  Enzymatic Nucleic Acid
aagggagggccgaaaggcgagugaggucugagcaucu

SEQ ID NO: 20570 - RNA, 37 nt, Artificial Sequence
  Description of Artificial Sequence:  Enzymatic Nucleic Acid
uucugggggccgaaaggcgagugaggucucauccauu

SEQ ID NO: 20571 - RNA, 37 nt, Artificial Sequence
  Description of Artificial Sequence:  Enzymatic Nucleic Acid
uguguacagccgaaaggcgagugaggucuucugucaa

SEQ ID NO: 20572 - RNA, 37 nt, Artificial Sequence
  Description of Artificial Sequence:  Enzymatic Nucleic Acid
auuguguagccgaaaggcgagugaggucuacucuguc

SEQ ID NO: 20573 - RNA, 37 nt, Artificial Sequence
  Description of Artificial Sequence:  Enzymatic Nucleic Acid
agacgucagccgaaaggcgagugaggucuucuggauu

SEQ ID NO: 20574 - RNA, 37 nt, Artificial Sequence
  Description of Artificial Sequence:  Enzymatic Nucleic Acid
agaccagagccgaaaggcgagugaggucugucacucu

SEQ ID NO: 20575 - RNA, 37 nt, Artificial Sequence
  Description of Artificial Sequence:  Enzymatic Nucleic Acid
ccaaaagagccgaaaggcgagugaggucucagacguc

SEQ ID NO: 20576 - RNA, 37 nt, Artificial Sequence
  Description of Artificial Sequence:  Enzymatic Nucleic Acid
gcaaaacagccgaaaggcgagugaggucucaaaagac

SEQ ID NO: 20577 - RNA, 37 nt, Artificial Sequence
  Description of Artificial Sequence:  Enzymatic Nucleic Acid
cagcaaaagccgaaaggcgagugaggucuaccaaaag

SEQ ID NO: 20578 - RNA, 37 nt, Artificial Sequence
  Description of Artificial Sequence:  Enzymatic Nucleic Acid
ucccacaggccgaaaggcgagugaggucuaaaacacc

SEQ ID NO: 20579 - RNA, 37 nt, Artificial Sequence
  Description of Artificial Sequence:  Enzymatic Nucleic Acid
auuucccagccgaaaggcgagugaggucuagcaaaac

SEQ ID NO: 20580 - RNA, 37 nt, Artificial Sequence
  Description of Artificial Sequence:  Enzymatic Nucleic Acid
gagaagcagccgaaaggcgagugaggucucuaaggaa

SEQ ID NO: 20581 - RNA, 37 nt, Artificial Sequence
  Description of Artificial Sequence:  Enzymatic Nucleic Acid
uggagaaggccgaaaggcgagugaggucuaccuaagg

SEQ ID NO: 20582 - RNA, 37 nt, Artificial Sequence
  Description of Artificial Sequence:  Enzymatic Nucleic Acid
aaucuuuagccgaaaggcgagugaggucucccaggau

SEQ ID NO: 20583 - RNA, 37 nt, Artificial Sequence
  Description of Artificial Sequence:  Enzymatic Nucleic Acid
aucgccuagccgaaaggcgagugaggucuaaaauucu

SEQ ID NO: 20584 - RNA, 37 nt, Artificial Sequence
  Description of Artificial Sequence:  Enzymatic Nucleic Acid
uucaaucggccgaaaggcgagugaggucucuacaaaa

SEQ ID NO: 20585 - RNA, 37 nt, Artificial Sequence
  Description of Artificial Sequence:  Enzymatic Nucleic Acid
aucagggggccgaaaggcgagugaggucuccucauuc

SEQ ID NO: 20586 - RNA, 37 nt, Artificial Sequence
  Description of Artificial Sequence:  Enzymatic Nucleic Acid
gucugguagccgaaaggcgagugaggucuauuucugg

SEQ ID NO: 20587 - RNA, 37 nt, Artificial Sequence
  Description of Artificial Sequence:  Enzymatic Nucleic Acid
caguccaggccgaaaggcgagugaggucuauggucug

SEQ ID NO: 20588 - RNA, 37 nt, Artificial Sequence
  Description of Artificial Sequence:  Enzymatic Nucleic Acid
cgugccaggccgaaaggcgagugaggucuaguccagc

SEQ ID NO: 20589 - RNA, 37 nt, Artificial Sequence
  Description of Artificial Sequence:  Enzymatic Nucleic Acid
uccccguggccgaaaggcgagugaggucucagcaguc

SEQ ID NO: 20590 - RNA, 37 nt, Artificial Sequence
  Description of Artificial Sequence:  Enzymatic Nucleic Acid
ugacuggggccgaaaggcgagugaggucuuccccgug

SEQ ID NO: 20591 - RNA, 37 nt, Artificial Sequence
  Description of Artificial Sequence:  Enzymatic Nucleic Acid
gucucugagccgaaaggcgagugaggucuugggcucc

SEQ ID NO: 20592 - RNA, 37 nt, Artificial Sequence
  Description of Artificial Sequence:  Enzymatic Nucleic Acid
ucugaaaagccgaaaggcgagugaggucugugggucu

SEQ ID NO: 20593 - RNA, 37 nt, Artificial Sequence
  Description of Artificial Sequence:  Enzymatic Nucleic Acid
uccaccaagccgaaaggcgagugaggucuucugaaaa

SEQ ID NO: 20594 - RNA, 37 nt, Artificial Sequence
  Description of Artificial Sequence:  Enzymatic Nucleic Acid
auguuccagccgaaaggcgagugaggucucaacucug

SEQ ID NO: 20595 - RNA, 37 nt, Artificial Sequence
  Description of Artificial Sequence:  Enzymatic Nucleic Acid
uuagcuuggccgaaaggcgagugaggucuaagagauu

SEQ ID NO: 20596 - RNA, 37 nt, Artificial Sequence
  Description of Artificial Sequence:  Enzymatic Nucleic Acid
agcauuaggccgaaaggcgagugaggucuuugcaaga

SEQ ID NO: 20597 - RNA, 37 nt, Artificial Sequence
  Description of Artificial Sequence:  Enzymatic Nucleic Acid
cugcugaggccgaaaggcgagugaggucuauuagcuu

SEQ ID NO: 20598 - RNA, 37 nt, Artificial Sequence
  Description of Artificial Sequence:  Enzymatic Nucleic Acid
ccauccuggccgaaaggcgagugaggucuugagcauu

SEQ ID NO: 20599 - RNA, 37 nt, Artificial Sequence
  Description of Artificial Sequence:  Enzymatic Nucleic Acid
agucuuuggccgaaaggcgagugaggucucauccugc

SEQ ID NO: 20600 - RNA, 37 nt, Artificial Sequence
  Description of Artificial Sequence:  Enzymatic Nucleic Acid
cggaagaagccgaaaggcgagugaggucuaauguagu

SEQ ID NO: 20601 - RNA, 37 nt, Artificial Sequence
  Description of Artificial Sequence:  Enzymatic Nucleic Acid
cuuccauggccgaaaggcgagugaggucuucaaaguc

SEQ ID NO: 20602 - RNA, 37 nt, Artificial Sequence
  Description of Artificial Sequence:  Enzymatic Nucleic Acid
gagguagggccgaaaggcgagugaggucuagagagag

SEQ ID NO: 20603 - RNA, 37 nt, Artificial Sequence
  Description of Artificial Sequence:  Enzymatic Nucleic Acid
acaggaaagccgaaaggcgagugaggucuaggugagg

SEQ ID NO: 20604 - RNA, 37 nt, Artificial Sequence
  Description of Artificial Sequence:  Enzymatic Nucleic Acid
ccuccauagccgaaaggcgagugaggucuaggaaaca

SEQ ID NO: 20605 - RNA, 37 nt, Artificial Sequence
  Description of Artificial Sequence:  Enzymatic Nucleic Acid
gucacauagccgaaaggcgagugaggucuuuccuccu

SEQ ID NO: 20606 - RNA, 37 nt, Artificial Sequence
  Description of Artificial Sequence:  Enzymatic Nucleic Acid
uggggucagccgaaaggcgagugaggucuauacuucc

SEQ ID NO: 20607 - RNA, 37 nt, Artificial Sequence
  Description of Artificial Sequence:  Enzymatic Nucleic Acid
gauuccuggccgaaaggcgagugaggucuuguguugu

SEQ ID NO: 20608 - RNA, 37 nt, Artificial Sequence
  Description of Artificial Sequence:  Enzymatic Nucleic Acid
gauacugagccgaaaggcgagugaggucuugauuccu

SEQ ID NO: 20609 - RNA, 37 nt, Artificial Sequence
  Description of Artificial Sequence:  Enzymatic Nucleic Acid
ugcagauagccgaaaggcgagugaggucuugacugau

SEQ ID NO: 20610 - RNA, 37 nt, Artificial Sequence
  Description of Artificial Sequence:  Enzymatic Nucleic Acid
cuguucuggccgaaaggcgagugaggucuagauacug

SEQ ID NO: 20611 - RNA, 37 nt, Artificial Sequence
  Description of Artificial Sequence:  Enzymatic Nucleic Acid
uucgcuuagccgaaaggcgagugaggucuuguucugc

SEQ ID NO: 20612 - RNA, 37 nt, Artificial Sequence
  Description of Artificial Sequence:  Enzymatic Nucleic Acid
cucuuucggccgaaaggcgagugaggucuuuacuguu

SEQ ID NO: 20613 - RNA, 37 nt, Artificial Sequence
  Description of Artificial Sequence:  Enzymatic Nucleic Acid
caggccgggccgaaaggcgagugaggucuucuuucgc

SEQ ID NO: 20614 - RNA, 37 nt, Artificial Sequence
  Description of Artificial Sequence:  Enzymatic Nucleic Acid
cucacagggccgaaaggcgagugaggucucggcucuu

SEQ ID NO: 20615 - RNA, 37 nt, Artificial Sequence
  Description of Artificial Sequence:  Enzymatic Nucleic Acid
uacacucagccgaaaggcgagugaggucuaggccggc

SEQ ID NO: 20616 - RNA, 37 nt, Artificial Sequence
  Description of Artificial Sequence:  Enzymatic Nucleic Acid
uuuuuacagccgaaaggcgagugaggucuucacaggc

SEQ ID NO: 20617 - RNA, 37 nt, Artificial Sequence
  Description of Artificial Sequence:  Enzymatic Nucleic Acid
uguuuuuagccgaaaggcgagugaggucuacucacag

SEQ ID NO: 20618 - RNA, 37 nt, Artificial Sequence
  Description of Artificial Sequence:  Enzymatic Nucleic Acid
ucuucuaagccgaaaggcgagugaggucugggauauc

SEQ ID NO: 20619 - RNA, 37 nt, Artificial Sequence
  Description of Artificial Sequence:  Enzymatic Nucleic Acid
uacuuuuagccgaaaggcgagugaggucuuucugguu

SEQ ID NO: 20620 - RNA, 37 nt, Artificial Sequence
  Description of Artificial Sequence:  Enzymatic Nucleic Acid
ugggauuagccgaaaggcgagugaggucuuuuuacuu

SEQ ID NO: 20621 - RNA, 37 nt, Artificial Sequence
  Description of Artificial Sequence:  Enzymatic Nucleic Acid
ccauaccagccgaaaggcgagugaggucuuguccguc

SEQ ID NO: 20622 - RNA, 37 nt, Artificial Sequence
  Description of Artificial Sequence:  Enzymatic Nucleic Acid
gaaccauagccgaaaggcgagugaggucucacugucc

SEQ ID NO: 20623 - RNA, 37 nt, Artificial Sequence
  Description of Artificial Sequence:  Enzymatic Nucleic Acid
ggcaagaagccgaaaggcgagugaggucucauaccac

SEQ ID NO: 20624 - RNA, 37 nt, Artificial Sequence
  Description of Artificial Sequence:  Enzymatic Nucleic Acid
uucugagggccgaaaggcgagugaggucuaagaacca

SEQ ID NO: 20625 - RNA, 37 nt, Artificial Sequence
  Description of Artificial Sequence:  Enzymatic Nucleic Acid
guuuucaggccgaaaggcgagugaggucuucuucuga

SEQ ID NO: 20626 - RNA, 37 nt, Artificial Sequence
  Description of Artificial Sequence:  Enzymatic Nucleic Acid
ccauuccagccgaaaggcgagugaggucucaaaagau

SEQ ID NO: 20627 - RNA, 37 nt, Artificial Sequence
  Description of Artificial Sequence:  Enzymatic Nucleic Acid
gcugggcagccgaaaggcgagugaggucucauuccac

SEQ ID NO: 20628 - RNA, 37 nt, Artificial Sequence
  Description of Artificial Sequence:  Enzymatic Nucleic Acid
uugcuggggccgaaaggcgagugaggucuaccauucc

SEQ ID NO: 20629 - RNA, 37 nt, Artificial Sequence
  Description of Artificial Sequence:  Enzymatic Nucleic Acid
ugcuuuuggccgaaaggcgagugaggucuugggcacc

SEQ ID NO: 20630 - RNA, 37 nt, Artificial Sequence
  Description of Artificial Sequence:  Enzymatic Nucleic Acid
acucccuggccgaaaggcgagugaggucuuuuugcug

SEQ ID NO: 20631 - RNA, 37 nt, Artificial Sequence
  Description of Artificial Sequence:  Enzymatic Nucleic Acid
gccacagagccgaaaggcgagugaggucuucccugcu

SEQ ID NO: 20632 - RNA, 37 nt, Artificial Sequence
  Description of Artificial Sequence:  Enzymatic Nucleic Acid
agaugccagccgaaaggcgagugaggucuagacuccc

SEQ ID NO: 20633 - RNA, 37 nt, Artificial Sequence
  Description of Artificial Sequence:  Enzymatic Nucleic Acid
uucagauggccgaaaggcgagugaggucucacagacu

SEQ ID NO: 20634 - RNA, 37 nt, Artificial Sequence
  Description of Artificial Sequence:  Enzymatic Nucleic Acid
gguuugaggccgaaaggcgagugaggucucuucagau

SEQ ID NO: 20635 - RNA, 37 nt, Artificial Sequence
  Description of Artificial Sequence:  Enzymatic Nucleic Acid
gguagccggccgaaaggcgagugaggucuuugucugg

SEQ ID NO: 20636 - RNA, 37 nt, Artificial Sequence
  Description of Artificial Sequence:  Enzymatic Nucleic Acid
acugguaggccgaaaggcgagugaggucucgcuuguc

SEQ ID NO: 20637 - RNA, 37 nt, Artificial Sequence
  Description of Artificial Sequence:  Enzymatic Nucleic Acid
uauccggagccgaaaggcgagugaggucuugguagcc

SEQ ID NO: 20638 - RNA, 37 nt, Artificial Sequence
  Description of Artificial Sequence:  Enzymatic Nucleic Acid
ggaguacagccgaaaggcgagugaggucugguggugu

SEQ ID NO: 20639 - RNA, 37 nt, Artificial Sequence
  Description of Artificial Sequence:  Enzymatic Nucleic Acid
cuggaguagccgaaaggcgagugaggucuacgguggu

SEQ ID NO: 20640 - RNA, 37 nt, Artificial Sequence
  Description of Artificial Sequence:  Enzymatic Nucleic Acid
cuuccucagccgaaaggcgagugaggucuuggaguac

SEQ ID NO: 20641 - RNA, 37 nt, Artificial Sequence
  Description of Artificial Sequence:  Enzymatic Nucleic Acid
aaguucuggccgaaaggcgagugaggucuuuccucac

SEQ ID NO: 20642 - RNA, 37 nt, Artificial Sequence
  Description of Artificial Sequence:  Enzymatic Nucleic Acid
ucuaucaggccgaaaggcgagugaggucuuuuaaaag

SEQ ID NO: 20643 - RNA, 37 nt, Artificial Sequence
  Description of Artificial Sequence:  Enzymatic Nucleic Acid
gguuugcagccgaaaggcgagugaggucuuccaaucu

SEQ ID NO: 20644 - RNA, 37 nt, Artificial Sequence
  Description of Artificial Sequence:  Enzymatic Nucleic Acid
ccgguuuggccgaaaggcgagugaggucuacuccaau

SEQ ID NO: 20645 - RNA, 37 nt, Artificial Sequence
  Description of Artificial Sequence:  Enzymatic Nucleic Acid
cugugcuagccgaaaggcgagugaggucucgguuugc

SEQ ID NO: 20646 - RNA, 37 nt, Artificial Sequence
  Description of Artificial Sequence:  Enzymatic Nucleic Acid
gggcuguggccgaaaggcgagugaggucuuaccgguu

SEQ ID NO: 20647 - RNA, 37 nt, Artificial Sequence
  Description of Artificial Sequence:  Enzymatic Nucleic Acid
aaucuggggccgaaaggcgagugaggucuugugcuac

SEQ ID NO: 20648 - RNA, 37 nt, Artificial Sequence
  Description of Artificial Sequence:  Enzymatic Nucleic Acid
gagucagggccgaaaggcgagugaggucuuggagaau

SEQ ID NO: 20649 - RNA, 37 nt, Artificial Sequence
  Description of Artificial Sequence:  Enzymatic Nucleic Acid
gaggagaggccgaaaggcgagugaggucuucagugug

SEQ ID NO: 20650 - RNA, 37 nt, Artificial Sequence
  Description of Artificial Sequence:  Enzymatic Nucleic Acid
cuuuuaaagccgaaaggcgagugaggucuaggaggag

SEQ ID NO: 20651 - RNA, 37 nt, Artificial Sequence
  Description of Artificial Sequence:  Enzymatic Nucleic Acid
uguggauggccgaaaggcgagugaggucuuuccuuuu

SEQ ID NO: 20652 - RNA, 37 nt, Artificial Sequence
  Description of Artificial Sequence:  Enzymatic Nucleic Acid
ugagcagagccgaaaggcgagugaggucucucucaug

SEQ ID NO: 20653 - RNA, 37 nt, Artificial Sequence
  Description of Artificial Sequence:  Enzymatic Nucleic Acid
aaucugaggccgaaaggcgagugaggucuagaccucu

SEQ ID NO: 20654 - RNA, 37 nt, Artificial Sequence
  Description of Artificial Sequence:  Enzymatic Nucleic Acid
gaacaacagccgaaaggcgagugaggucuuucaaaau

SEQ ID NO: 20655 - RNA, 37 nt, Artificial Sequence
  Description of Artificial Sequence:  Enzymatic Nucleic Acid
aagaacaagccgaaaggcgagugaggucuacuucaaa

SEQ ID NO: 20656 - RNA, 37 nt, Artificial Sequence
  Description of Artificial Sequence:  Enzymatic Nucleic Acid
ggaaagaagccgaaaggcgagugaggucuaacacuuc

SEQ ID NO: 20657 - RNA, 37 nt, Artificial Sequence
  Description of Artificial Sequence:  Enzymatic Nucleic Acid
acuuccuggccgaaaggcgagugaggucuugguggaa

SEQ ID NO: 20658 - RNA, 37 nt, Artificial Sequence
  Description of Artificial Sequence:  Enzymatic Nucleic Acid
ugcggcuagccgaaaggcgagugaggucuuuccugcu

SEQ ID NO: 20659 - RNA, 37 nt, Artificial Sequence
  Description of Artificial Sequence:  Enzymatic Nucleic Acid
aaaugcgggccgaaaggcgagugaggucuuacuuccu

SEQ ID NO: 20660 - RNA, 37 nt, Artificial Sequence
  Description of Artificial Sequence:  Enzymatic Nucleic Acid
aucaaauggccgaaaggcgagugaggucuggcuacuu

SEQ ID NO: 20661 - RNA, 37 nt, Artificial Sequence
  Description of Artificial Sequence:  Enzymatic Nucleic Acid
gcucccuggccgaaaggcgagugaggucuaguccgag

SEQ ID NO: 20662 - RNA, 37 nt, Artificial Sequence
  Description of Artificial Sequence:  Enzymatic Nucleic Acid
aagacugggccgaaaggcgagugaggucuucccugca

SEQ ID NO: 20663 - RNA, 37 nt, Artificial Sequence
  Description of Artificial Sequence:  Enzymatic Nucleic Acid
cuagaagagccgaaaggcgagugaggucuuggcuccc

SEQ ID NO: 20664 - RNA, 37 nt, Artificial Sequence
  Description of Artificial Sequence:  Enzymatic Nucleic Acid
aggauauggccgaaaggcgagugaggucucuagaaga

SEQ ID NO: 20665 - RNA, 37 nt, Artificial Sequence
  Description of Artificial Sequence:  Enzymatic Nucleic Acid
gucacaaggccgaaaggcgagugaggucucucuucca

SEQ ID NO: 20666 - RNA, 37 nt, Artificial Sequence
  Description of Artificial Sequence:  Enzymatic Nucleic Acid
uugggucagccgaaaggcgagugaggucuaagccucu

SEQ ID NO: 20667 - RNA, 37 nt, Artificial Sequence
  Description of Artificial Sequence:  Enzymatic Nucleic Acid
cacagacagccgaaaggcgagugaggucuauucuugg

SEQ ID NO: 20668 - RNA, 37 nt, Artificial Sequence
  Description of Artificial Sequence:  Enzymatic Nucleic Acid
gacacagagccgaaaggcgagugaggucuacauucuu

SEQ ID NO: 20669 - RNA, 37 nt, Artificial Sequence
  Description of Artificial Sequence:  Enzymatic Nucleic Acid
agaagacagccgaaaggcgagugaggucuagacacau

SEQ ID NO: 20670 - RNA, 37 nt, Artificial Sequence
  Description of Artificial Sequence:  Enzymatic Nucleic Acid
ggagaagagccgaaaggcgagugaggucuacagacac

SEQ ID NO: 20671 - RNA, 37 nt, Artificial Sequence
  Description of Artificial Sequence:  Enzymatic Nucleic Acid
ggucaacagccgaaaggcgagugaggucuugggagaa

SEQ ID NO: 20672 - RNA, 37 nt, Artificial Sequence
  Description of Artificial Sequence:  Enzymatic Nucleic Acid
caggucaagccgaaaggcgagugaggucuacugggag

SEQ ID NO: 20673 - RNA, 37 nt, Artificial Sequence
  Description of Artificial Sequence:  Enzymatic Nucleic Acid
ugauaauggccgaaaggcgagugaggucuuuuuuaaa

SEQ ID NO: 20674 - RNA, 37 nt, Artificial Sequence
  Description of Artificial Sequence:  Enzymatic Nucleic Acid
agcagggggccgaaaggcgagugaggucuaugauaau

SEQ ID NO: 20675 - RNA, 37 nt, Artificial Sequence
  Description of Artificial Sequence:  Enzymatic Nucleic Acid
acccgcaggccgaaaggcgagugaggucuaggggcau

SEQ ID NO: 20676 - RNA, 37 nt, Artificial Sequence
  Description of Artificial Sequence:  Enzymatic Nucleic Acid
gagacccggccgaaaggcgagugaggucuagcagggg

SEQ ID NO: 20677 - RNA, 37 nt, Artificial Sequence
  Description of Artificial Sequence:  Enzymatic Nucleic Acid
uggugagagccgaaaggcgagugaggucuccgcagca

SEQ ID NO: 20678 - RNA, 37 nt, Artificial Sequence
  Description of Artificial Sequence:  Enzymatic Nucleic Acid
guucuaaagccgaaaggcgagugaggucuccauggug

SEQ ID NO: 20679 - RNA, 37 nt, Artificial Sequence
  Description of Artificial Sequence:  Enzymatic Nucleic Acid
gcuugaaggccgaaaggcgagugaggucuucuuuguu

SEQ ID NO: 20680 - RNA, 37 nt, Artificial Sequence
  Description of Artificial Sequence:  Enzymatic Nucleic Acid
ggccauuggccgaaaggcgagugaggucuuugaagcu

SEQ ID NO: 20681 - RNA, 37 nt, Artificial Sequence
  Description of Artificial Sequence:  Enzymatic Nucleic Acid
ggaugggggccgaaaggcgagugaggucucauugcuu

SEQ ID NO: 20682 - RNA, 37 nt, Artificial Sequence
  Description of Artificial Sequence:  Enzymatic Nucleic Acid
uacugcuagccgaaaggcgagugaggucuuucuuuga

SEQ ID NO: 20683 - RNA, 37 nt, Artificial Sequence
  Description of Artificial Sequence:  Enzymatic Nucleic Acid
agguacuggccgaaaggcgagugaggucuuacuucuu

SEQ ID NO: 20684 - RNA, 37 nt, Artificial Sequence
  Description of Artificial Sequence:  Enzymatic Nucleic Acid
cccagguagccgaaaggcgagugaggucuugcuacuu

SEQ ID NO: 20685 - RNA, 37 nt, Artificial Sequence
  Description of Artificial Sequence:  Enzymatic Nucleic Acid
agugucaggccgaaaggcgagugaggucuuccccagg

SEQ ID NO: 20686 - RNA, 37 nt, Artificial Sequence
  Description of Artificial Sequence:  Enzymatic Nucleic Acid
uaguuuuagccgaaaggcgagugaggucuagaagugu

SEQ ID NO: 20687 - RNA, 37 nt, Artificial Sequence
  Description of Artificial Sequence:  Enzymatic Nucleic Acid
uuacguuggccgaaaggcgagugaggucucugguuua

SEQ ID NO: 20688 - RNA, 37 nt, Artificial Sequence
  Description of Artificial Sequence:  Enzymatic Nucleic Acid
aacacuuagccgaaaggcgagugaggucuguugccug

SEQ ID NO: 20689 - RNA, 37 nt, Artificial Sequence
  Description of Artificial Sequence:  Enzymatic Nucleic Acid
cucgaacagccgaaaggcgagugaggucuuuacguug

SEQ ID NO: 20690 - RNA, 37 nt, Artificial Sequence
  Description of Artificial Sequence:  Enzymatic Nucleic Acid
accucgaagccgaaaggcgagugaggucuacuuacgu

SEQ ID NO: 20691 - RNA, 37 nt, Artificial Sequence
  Description of Artificial Sequence:  Enzymatic Nucleic Acid
cuucaacagccgaaaggcgagugaggucucucgaaca

SEQ ID NO: 20692 - RNA, 37 nt, Artificial Sequence
  Description of Artificial Sequence:  Enzymatic Nucleic Acid
aucuucaagccgaaaggcgagugaggucuaccucgaa

SEQ ID NO: 20693 - RNA, 37 nt, Artificial Sequence
  Description of Artificial Sequence:  Enzymatic Nucleic Acid
cagcccuggccgaaaggcgagugaggucuaaauccuu

SEQ ID NO: 20694 - RNA, 37 nt, Artificial Sequence
  Description of Artificial Sequence:  Enzymatic Nucleic Acid
agacucaggccgaaaggcgagugaggucuccugcaaa

SEQ ID NO: 20695 - RNA, 37 nt, Artificial Sequence
  Description of Artificial Sequence:  Enzymatic Nucleic Acid
uggauagagccgaaaggcgagugaggucuucagcccu

SEQ ID NO: 20696 - RNA, 37 nt, Artificial Sequence
  Description of Artificial Sequence:  Enzymatic Nucleic Acid
aaacaaaggccgaaaggcgagugaggucucucuugga

SEQ ID NO: 20697 - RNA, 37 nt, Artificial Sequence
  Description of Artificial Sequence:  Enzymatic Nucleic Acid
guccuaaagccgaaaggcgagugaggucuaaagccuc

SEQ ID NO: 20698 - RNA, 37 nt, Artificial Sequence
  Description of Artificial Sequence:  Enzymatic Nucleic Acid
gggacccagccgaaaggcgagugaggucuguccuaaa

SEQ ID NO: 20699 - RNA, 37 nt, Artificial Sequence
  Description of Artificial Sequence:  Enzymatic Nucleic Acid
gcuugggagccgaaaggcgagugaggucuccacgucc

SEQ ID NO: 20700 - RNA, 37 nt, Artificial Sequence
  Description of Artificial Sequence:  Enzymatic Nucleic Acid
aggcuugggccgaaaggcgagugaggucuuugggacc

SEQ ID NO: 20701 - RNA, 37 nt, Artificial Sequence
  Description of Artificial Sequence:  Enzymatic Nucleic Acid
acuuaagggccgaaaggcgagugaggucuuuggcuug

SEQ ID NO: 20702 - RNA, 37 nt, Artificial Sequence
  Description of Artificial Sequence:  Enzymatic Nucleic Acid
auuccacagccgaaaggcgagugaggucuuuaaggcu

SEQ ID NO: 20703 - RNA, 37 nt, Artificial Sequence
  Description of Artificial Sequence:  Enzymatic Nucleic Acid
gaauuccagccgaaaggcgagugaggucuacuuaagg

SEQ ID NO: 20704 - RNA, 37 nt, Artificial Sequence
  Description of Artificial Sequence:  Enzymatic Nucleic Acid
caagguaagccgaaaggcgagugaggucuguuagucu

SEQ ID NO: 20705 - RNA, 37 nt, Artificial Sequence
  Description of Artificial Sequence:  Enzymatic Nucleic Acid
cuccaaaggccgaaaggcgagugaggucuaagguaac

SEQ ID NO: 20706 - RNA, 37 nt, Artificial Sequence
  Description of Artificial Sequence:  Enzymatic Nucleic Acid
cuccaguagccgaaaggcgagugaggucuucuccaaa

SEQ ID NO: 20707 - RNA, 37 nt, Artificial Sequence
  Description of Artificial Sequence:  Enzymatic Nucleic Acid
uuugcagggccgaaaggcgagugaggucuuccaguac

SEQ ID NO: 20708 - RNA, 37 nt, Artificial Sequence
  Description of Artificial Sequence:  Enzymatic Nucleic Acid
ugcauuuggccgaaaggcgagugaggucuaggcucca

SEQ ID NO: 20709 - RNA, 37 nt, Artificial Sequence
  Description of Artificial Sequence:  Enzymatic Nucleic Acid
acacaauggccgaaaggcgagugaggucuauuugcag

SEQ ID NO: 20710 - RNA, 37 nt, Artificial Sequence
  Description of Artificial Sequence:  Enzymatic Nucleic Acid
agcaaacagccgaaaggcgagugaggucuaaugcauu

SEQ ID NO: 20711 - RNA, 37 nt, Artificial Sequence
  Description of Artificial Sequence:  Enzymatic Nucleic Acid
agagcaaagccgaaaggcgagugaggucuacaaugca

SEQ ID NO: 20712 - RNA, 37 nt, Artificial Sequence
  Description of Artificial Sequence:  Enzymatic Nucleic Acid
caccagaggccgaaaggcgagugaggucuaaacacaa

SEQ ID NO: 20713 - RNA, 37 nt, Artificial Sequence
  Description of Artificial Sequence:  Enzymatic Nucleic Acid
caccuccagccgaaaggcgagugaggucucagagcaa

SEQ ID NO: 20714 - RNA, 37 nt, Artificial Sequence
  Description of Artificial Sequence:  Enzymatic Nucleic Acid
caugcccagccgaaaggcgagugaggucucuccacca

SEQ ID NO: 20715 - RNA, 37 nt, Artificial Sequence
  Description of Artificial Sequence:  Enzymatic Nucleic Acid
accccauggccgaaaggcgagugaggucuccaccucc

SEQ ID NO: 20716 - RNA, 37 nt, Artificial Sequence
  Description of Artificial Sequence:  Enzymatic Nucleic Acid
agaacagagccgaaaggcgagugaggucucccaugcc

SEQ ID NO: 20717 - RNA, 37 nt, Artificial Sequence
  Description of Artificial Sequence:  Enzymatic Nucleic Acid
uuucagaagccgaaaggcgagugaggucuagacccca

SEQ ID NO: 20718 - RNA, 37 nt, Artificial Sequence
  Description of Artificial Sequence:  Enzymatic Nucleic Acid
acccuuuagccgaaaggcgagugaggucuauuucaga

SEQ ID NO: 20719 - RNA, 37 nt, Artificial Sequence
  Description of Artificial Sequence:  Enzymatic Nucleic Acid
cgucugaagccgaaaggcgagugaggucuccuuuaca

SEQ ID NO: 20720 - RNA, 37 nt, Artificial Sequence
  Description of Artificial Sequence:  Enzymatic Nucleic Acid
accagaaagccgaaaggcgagugaggucucccgucug

SEQ ID NO: 20721 - RNA, 37 nt, Artificial Sequence
  Description of Artificial Sequence:  Enzymatic Nucleic Acid
uucuaaaagccgaaaggcgagugaggucucagaaacc

SEQ ID NO: 20722 - RNA, 37 nt, Artificial Sequence
  Description of Artificial Sequence:  Enzymatic Nucleic Acid
acacgcaagccgaaaggcgagugaggucucuucuaaa

SEQ ID NO: 20723 - RNA, 37 nt, Artificial Sequence
  Description of Artificial Sequence:  Enzymatic Nucleic Acid
agaacacggccgaaaggcgagugaggucuaaccuucu

SEQ ID NO: 20724 - RNA, 37 nt, Artificial Sequence
  Description of Artificial Sequence:  Enzymatic Nucleic Acid
gaagaacagccgaaaggcgagugaggucugcaaccuu

SEQ ID NO: 20725 - RNA, 37 nt, Artificial Sequence
  Description of Artificial Sequence:  Enzymatic Nucleic Acid
ucgaagaagccgaaaggcgagugaggucuacgcaacc

SEQ ID NO: 20726 - RNA, 37 nt, Artificial Sequence
  Description of Artificial Sequence:  Enzymatic Nucleic Acid
uagcccaagccgaaaggcgagugaggucuucgaagaa

SEQ ID NO: 20727 - RNA, 37 nt, Artificial Sequence
  Description of Artificial Sequence:  Enzymatic Nucleic Acid
uacuuuaggccgaaaggcgagugaggucuccaacucg

SEQ ID NO: 20728 - RNA, 37 nt, Artificial Sequence
  Description of Artificial Sequence:  Enzymatic Nucleic Acid
gaacucuagccgaaaggcgagugaggucuuuuagccc

SEQ ID NO: 20729 - RNA, 37 nt, Artificial Sequence
  Description of Artificial Sequence:  Enzymatic Nucleic Acid
acaacgaagccgaaaggcgagugaggucuucuacuuu

SEQ ID NO: 20730 - RNA, 37 nt, Artificial Sequence
  Description of Artificial Sequence:  Enzymatic Nucleic Acid
cagcacaagccgaaaggcgagugaggucugaacucua

SEQ ID NO: 20731 - RNA, 37 nt, Artificial Sequence
  Description of Artificial Sequence:  Enzymatic Nucleic Acid
aaacagcagccgaaaggcgagugaggucuaacgaacu

SEQ ID NO: 20732 - RNA, 37 nt, Artificial Sequence
  Description of Artificial Sequence:  Enzymatic Nucleic Acid
agaaacaggccgaaaggcgagugaggucuacaacgaa

SEQ ID NO: 20733 - RNA, 37 nt, Artificial Sequence
  Description of Artificial Sequence:  Enzymatic Nucleic Acid
gucagaaagccgaaaggcgagugaggucuagcacaac

SEQ ID NO: 20734 - RNA, 37 nt, Artificial Sequence
  Description of Artificial Sequence:  Enzymatic Nucleic Acid
ggaaggaagccgaaaggcgagugaggucuucucauua

SEQ ID NO: 20735 - RNA, 37 nt, Artificial Sequence
  Description of Artificial Sequence:  Enzymatic Nucleic Acid
acagcuaagccgaaaggcgagugaggucuggucugga

SEQ ID NO: 20736 - RNA, 37 nt, Artificial Sequence
  Description of Artificial Sequence:  Enzymatic Nucleic Acid
ggagacaggccgaaaggcgagugaggucuuaacgguc

SEQ ID NO: 20737 - RNA, 37 nt, Artificial Sequence
  Description of Artificial Sequence:  Enzymatic Nucleic Acid
caaggagagccgaaaggcgagugaggucuagcuaacg

SEQ ID NO: 20738 - RNA, 37 nt, Artificial Sequence
  Description of Artificial Sequence:  Enzymatic Nucleic Acid
gggcuugggccgaaaggcgagugaggucuaaggagac

SEQ ID NO: 20739 - RNA, 37 nt, Artificial Sequence
  Description of Artificial Sequence:  Enzymatic Nucleic Acid
uccugggggccgaaaggcgagugaggucuuuggcaag

SEQ ID NO: 20740 - RNA, 37 nt, Artificial Sequence
  Description of Artificial Sequence:  Enzymatic Nucleic Acid
cagagcuggccgaaaggcgagugaggucuaucauuuu

SEQ ID NO: 20741 - RNA, 37 nt, Artificial Sequence
  Description of Artificial Sequence:  Enzymatic Nucleic Acid
agccagaggccgaaaggcgagugaggucuugcaucau

SEQ ID NO: 20742 - RNA, 37 nt, Artificial Sequence
  Description of Artificial Sequence:  Enzymatic Nucleic Acid
acaaggaggccgaaaggcgagugaggucucagagcug

SEQ ID NO: 20743 - RNA, 37 nt, Artificial Sequence
  Description of Artificial Sequence:  Enzymatic Nucleic Acid
cugggagagccgaaaggcgagugaggucuaaggagcc

SEQ ID NO: 20744 - RNA, 37 nt, Artificial Sequence
  Description of Artificial Sequence:  Enzymatic Nucleic Acid
aggaucaggccgaaaggcgagugaggucucugggaga

SEQ ID NO: 20745 - RNA, 37 nt, Artificial Sequence
  Description of Artificial Sequence:  Enzymatic Nucleic Acid
gccuugaggccgaaaggcgagugaggucuugaauguc

SEQ ID NO: 20746 - RNA, 37 nt, Artificial Sequence
  Description of Artificial Sequence:  Enzymatic Nucleic Acid
gcagggaggccgaaaggcgagugaggucucuugagcu

SEQ ID NO: 20747 - RNA, 37 nt, Artificial Sequence
  Description of Artificial Sequence:  Enzymatic Nucleic Acid
caacacgggccgaaaggcgagugaggucuagggagcc

SEQ ID NO: 20748 - RNA, 37 nt, Artificial Sequence
  Description of Artificial Sequence:  Enzymatic Nucleic Acid
cuucaacagccgaaaggcgagugaggucuggcaggga

SEQ ID NO: 20749 - RNA, 37 nt, Artificial Sequence
  Description of Artificial Sequence:  Enzymatic Nucleic Acid
cucuucaagccgaaaggcgagugaggucuacggcagg

SEQ ID NO: 20750 - RNA, 37 nt, Artificial Sequence
  Description of Artificial Sequence:  Enzymatic Nucleic Acid
agucagaagccgaaaggcgagugaggucuucuucaac

SEQ ID NO: 20751 - RNA, 37 nt, Artificial Sequence
  Description of Artificial Sequence:  Enzymatic Nucleic Acid
gguuuguggccgaaaggcgagugaggucuagucagaa

SEQ ID NO: 20752 - RNA, 37 nt, Artificial Sequence
  Description of Artificial Sequence:  Enzymatic Nucleic Acid
accagaaggccgaaaggcgagugaggucuugguuugu

SEQ ID NO: 20753 - RNA, 37 nt, Artificial Sequence
  Description of Artificial Sequence:  Enzymatic Nucleic Acid
agaagaaagccgaaaggcgagugaggucucagaagcu

SEQ ID NO: 20754 - RNA, 37 nt, Artificial Sequence
  Description of Artificial Sequence:  Enzymatic Nucleic Acid
caucaggagccgaaaggcgagugaggucuagauauga

SEQ ID NO: 20755 - RNA, 37 nt, Artificial Sequence
  Description of Artificial Sequence:  Enzymatic Nucleic Acid
acauaucagccgaaaggcgagugaggucuaucaggac

SEQ ID NO: 20756 - RNA, 37 nt, Artificial Sequence
  Description of Artificial Sequence:  Enzymatic Nucleic Acid
gucucagagccgaaaggcgagugaggucuauaucaca

SEQ ID NO: 20757 - RNA, 37 nt, Artificial Sequence
  Description of Artificial Sequence:  Enzymatic Nucleic Acid
accucccggccgaaaggcgagugaggucuauucaguc

SEQ ID NO: 20758 - RNA, 37 nt, Artificial Sequence
  Description of Artificial Sequence:  Enzymatic Nucleic Acid
acauugaagccgaaaggcgagugaggucucucccgca

SEQ ID NO: 20759 - RNA, 37 nt, Artificial Sequence
  Description of Artificial Sequence:  Enzymatic Nucleic Acid
cagcuucagccgaaaggcgagugaggucuauugaacc

SEQ ID NO: 20760 - RNA, 37 nt, Artificial Sequence
  Description of Artificial Sequence:  Enzymatic Nucleic Acid
acacacaggccgaaaggcgagugaggucuuucacauu

SEQ ID NO: 20761 - RNA, 37 nt, Artificial Sequence
  Description of Artificial Sequence:  Enzymatic Nucleic Acid
accacacagccgaaaggcgagugaggucuagcuucac

SEQ ID NO: 20762 - RNA, 37 nt, Artificial Sequence
  Description of Artificial Sequence:  Enzymatic Nucleic Acid
acaccacagccgaaaggcgagugaggucuacagcuuc

SEQ ID NO: 20763 - RNA, 37 nt, Artificial Sequence
  Description of Artificial Sequence:  Enzymatic Nucleic Acid
ugacaccagccgaaaggcgagugaggucuacacagcu

SEQ ID NO: 20764 - RNA, 37 nt, Artificial Sequence
  Description of Artificial Sequence:  Enzymatic Nucleic Acid
cuuugacagccgaaaggcgagugaggucucacacaca

SEQ ID NO: 20765 - RNA, 37 nt, Artificial Sequence
  Description of Artificial Sequence:  Enzymatic Nucleic Acid
aacuuugagccgaaaggcgagugaggucuaccacaca

SEQ ID NO: 20766 - RNA, 37 nt, Artificial Sequence
  Description of Artificial Sequence:  Enzymatic Nucleic Acid
uccugaaagccgaaaggcgagugaggucuuuugacac

SEQ ID NO: 20767 - RNA, 37 nt, Artificial Sequence
  Description of Artificial Sequence:  Enzymatic Nucleic Acid
gggaagaagccgaaaggcgagugaggucuaaaagggu

SEQ ID NO: 20768 - RNA, 37 nt, Artificial Sequence
  Description of Artificial Sequence:  Enzymatic Nucleic Acid
guuggggagccgaaaggcgagugaggucuagggggaa

SEQ ID NO: 20769 - RNA, 37 nt, Artificial Sequence
  Description of Artificial Sequence:  Enzymatic Nucleic Acid
auggguuggccgaaaggcgagugaggucuggggugag

SEQ ID NO: 20770 - RNA, 37 nt, Artificial Sequence
  Description of Artificial Sequence:  Enzymatic Nucleic Acid
cuaaaauagccgaaaggcgagugaggucuugaugggu

SEQ ID NO: 20771 - RNA, 37 nt, Artificial Sequence
  Description of Artificial Sequence:  Enzymatic Nucleic Acid
ccaaauaagccgaaaggcgagugaggucuuaaaauac

SEQ ID NO: 20772 - RNA, 37 nt, Artificial Sequence
  Description of Artificial Sequence:  Enzymatic Nucleic Acid
aguagagggccgaaaggcgagugaggucucaaauaac

SEQ ID NO: 20773 - RNA, 37 nt, Artificial Sequence
  Description of Artificial Sequence:  Enzymatic Nucleic Acid
cagguuuagccgaaaggcgagugaggucuuggaguag

SEQ ID NO: 20774 - RNA, 37 nt, Artificial Sequence
  Description of Artificial Sequence:  Enzymatic Nucleic Acid
ugaacaaagccgaaaggcgagugaggucuccaaucag

SEQ ID NO: 20775 - RNA, 37 nt, Artificial Sequence
  Description of Artificial Sequence:  Enzymatic Nucleic Acid
agagugaagccgaaaggcgagugaggucuaaacccaa

SEQ ID NO: 20776 - RNA, 37 nt, Artificial Sequence
  Description of Artificial Sequence:  Enzymatic Nucleic Acid
aagucugggccgaaaggcgagugaggucuuaauaauc

SEQ ID NO: 20777 - RNA, 37 nt, Artificial Sequence
  Description of Artificial Sequence:  Enzymatic Nucleic Acid
aauuuggggccgaaaggcgagugaggucuuauaaaau

SEQ ID NO: 20778 - RNA, 37 nt, Artificial Sequence
  Description of Artificial Sequence:  Enzymatic Nucleic Acid
aaauaauagccgaaaggcgagugaggucuaauagaug

SEQ ID NO: 20779 - RNA, 37 nt, Artificial Sequence
  Description of Artificial Sequence:  Enzymatic Nucleic Acid
agaaauaggccgaaaggcgagugaggucuucuauaug

SEQ ID NO: 20780 - RNA, 37 nt, Artificial Sequence
  Description of Artificial Sequence:  Enzymatic Nucleic Acid
aacaaggggccgaaaggcgagugaggucuaaaaauca

SEQ ID NO: 20781 - RNA, 37 nt, Artificial Sequence
  Description of Artificial Sequence:  Enzymatic Nucleic Acid
ggacagaagccgaaaggcgagugaggucuaagggcaa

SEQ ID NO: 20782 - RNA, 37 nt, Artificial Sequence
  Description of Artificial Sequence:  Enzymatic Nucleic Acid
aaaaaggagccgaaaggcgagugaggucuagaacaag

SEQ ID NO: 20783 - RNA, 37 nt, Artificial Sequence
  Description of Artificial Sequence:  Enzymatic Nucleic Acid
aaaaaacagccgaaaggcgagugaggucuauuuucuu

SEQ ID NO: 20784 - RNA, 37 nt, Artificial Sequence
  Description of Artificial Sequence:  Enzymatic Nucleic Acid
acaaaaaagccgaaaggcgagugaggucuacauuuuc

SEQ ID NO: 20785 - RNA, 37 nt, Artificial Sequence
  Description of Artificial Sequence:  Enzymatic Nucleic Acid
guaccaaagccgaaaggcgagugaggucuaaaaaaca

SEQ ID NO: 20786 - RNA, 37 nt, Artificial Sequence
  Description of Artificial Sequence:  Enzymatic Nucleic Acid
cuaugguagccgaaaggcgagugaggucucaaacaaa

SEQ ID NO: 20787 - RNA, 37 nt, Artificial Sequence
  Description of Artificial Sequence:  Enzymatic Nucleic Acid
auuucacagccgaaaggcgagugaggucuuaugguac

SEQ ID NO: 20788 - RNA, 37 nt, Artificial Sequence
  Description of Artificial Sequence:  Enzymatic Nucleic Acid
gcauuucagccgaaaggcgagugaggucuacuauggu

SEQ ID NO: 20789 - RNA, 37 nt, Artificial Sequence
  Description of Artificial Sequence:  Enzymatic Nucleic Acid
guucccaggccgaaaggcgagugaggucuauuucaca

SEQ ID NO: 20790 - RNA, 37 nt, Artificial Sequence
  Description of Artificial Sequence:  Enzymatic Nucleic Acid
ugccauaggccgaaaggcgagugaggucuaugucuua

SEQ ID NO: 20791 - RNA, 37 nt, Artificial Sequence
  Description of Artificial Sequence:  Enzymatic Nucleic Acid
uauauguggccgaaaggcgagugaggucucauagcau

SEQ ID NO: 20792 - RNA, 37 nt, Artificial Sequence
  Description of Artificial Sequence:  Enzymatic Nucleic Acid
uaaacagagccgaaaggcgagugaggucuuauaaaua

SEQ ID NO: 20793 - RNA, 37 nt, Artificial Sequence
  Description of Artificial Sequence:  Enzymatic Nucleic Acid
uacauaaagccgaaaggcgagugaggucuagacuaua

SEQ ID NO: 20794 - RNA, 37 nt, Artificial Sequence
  Description of Artificial Sequence:  Enzymatic Nucleic Acid
uguuucuagccgaaaggcgagugaggucuauaaacag

SEQ ID NO: 20795 - RNA, 37 nt, Artificial Sequence
  Description of Artificial Sequence:  Enzymatic Nucleic Acid
auauauuagccgaaaggcgagugaggucuauuuguuu

SEQ ID NO: 20796 - RNA, 37 nt, Artificial Sequence
  Description of Artificial Sequence:  Enzymatic Nucleic Acid
auauaagggccgaaaggcgagugaggucuuuuaauau

SEQ ID NO: 20797 - RNA, 37 nt, Artificial Sequence
  Description of Artificial Sequence:  Enzymatic Nucleic Acid
gaauaguagccgaaaggcgagugaggucuaaaguuca

SEQ ID NO: 20798 - RNA, 37 nt, Artificial Sequence
  Description of Artificial Sequence:  Enzymatic Nucleic Acid
uacugauagccgaaaggcgagugaggucuaaaaugug

SEQ ID NO: 20799 - RNA, 37 nt, Artificial Sequence
  Description of Artificial Sequence:  Enzymatic Nucleic Acid
acauaauagccgaaaggcgagugaggucuugauacaa

SEQ ID NO: 20800 - RNA, 37 nt, Artificial Sequence
  Description of Artificial Sequence:  Enzymatic Nucleic Acid
uuaugcuagccgaaaggcgagugaggucuauaauacu

SEQ ID NO: 20801 - RNA, 37 nt, Artificial Sequence
  Description of Artificial Sequence:  Enzymatic Nucleic Acid
uuguuauggccgaaaggcgagugaggucuuacauaau

SEQ ID NO: 20802 - RNA, 37 nt, Artificial Sequence
  Description of Artificial Sequence:  Enzymatic Nucleic Acid
cauuaugagccgaaaggcgagugaggucucuuuguua

SEQ ID NO: 20803 - RNA, 37 nt, Artificial Sequence
  Description of Artificial Sequence:  Enzymatic Nucleic Acid
gcugaaaggccgaaaggcgagugaggucuauuaugac

SEQ ID NO: 20804 - RNA, 37 nt, Artificial Sequence
  Description of Artificial Sequence:  Enzymatic Nucleic Acid
aucaauuggccgaaaggcgagugaggucuugaaagca

SEQ ID NO: 20805 - RNA, 37 nt, Artificial Sequence
  Description of Artificial Sequence:  Enzymatic Nucleic Acid
uaaaaugagccgaaaggcgagugaggucuaucaauug

SEQ ID NO: 20806 - RNA, 11 nt, Artificial Sequence
  Description of Artificial Sequence:  Miscellaneous substrate
  misc_feature (1)..(4): n stands for any a, c, g, or u
  misc_feature (7)..(11): n stands for any a, c, g, or u
nnnnuhnnnnn

SEQ ID NO: 20807 - RNA, 28 nt, Artificial Sequence
  Description of Artificial Sequence:  Enzymatic Nucleic Acid
  misc_feature (1)..(5): n stands for any a, c, g, or u
  misc_feature (10)..(10): n stands for any a, c, g, or u
  misc_feature (14)..(19): n stands for any a, c, g, or u
  misc_feature (25)..(28): n stands for any a, c, g, or u
nnnnncugangagnnnnnncgaaannnn

SEQ ID NO: 20808 - RNA, 15 nt, Artificial Sequence
  Description of Artificial Sequence:  Miscellaneous substrate
  misc_feature (1)..(7): n stands for any a, c, g, or u
  misc_feature (9)..(9): n stands for any a, c, g, or u
  misc_feature (13)..(15): n stands for any a, c, g, or u
nnnnnnnynghynnn

SEQ ID NO: 20809 - RNA, 47 nt, Artificial Sequence
  Description of Artificial Sequence:  Enzymatic Nucleic Acid
  misc_feature (1)..(4): n stands for any a, c, g, or u
  misc_feature (9)..(19): n stands for any a, c, g, or u
  misc_feature (25)..(31): n stands for any a, c, g, or u
  misc_feature (39)..(47): n stands for any a, c, g, or u
nnnngaagnnnnnnnnnnnaaahannnnnnnacauuacnnnnnnnnn

SEQ ID NO: 20810 - RNA, 85 nt, Artificial Sequence
  Description of Artificial Sequence:  Enzymatic Nucleic Acid
uggccggcauggucccagccuccucgcuggcgccggcugggcaacauuccgaggggaccguccccucgguaauggcgaaugggac

SEQ ID NO: 20811 - RNA, 176 nt, Artificial Sequence
  Description of Artificial Sequence:  Enzymatic Nucleic Acid
gggaaagcuugcgaagggcgucgucgccccgagcgguaguaagcagggaacucaccuccaauuucaguacugaaauugucguagcaguugacuacuguuaugugauugguagaggcuaagugacgguauuggcguaagucaguauugcagcacagcacaagcccgcuugcgagaau

SEQ ID NO: 20812 - RNA, 15 nt, Artificial Sequence
  Description of Artificial Sequence:  flt-1 substrate
guaugguuaaaagau

SEQ ID NO: 20813 - RNA, 34 nt, Artificial Sequence; identical to SEQ ID NO: 13480
  Description of Artificial Sequence:  Enzymatic Nucleic Acid
  misc_feature (1)..(4): Phosphorothioate 3'-Internucleotide Linkage
  misc_feature (1)..(8): 2'-O-Methyl
  misc_feature (14)..(24): 2'-O-Methyl
  misc_feature (26)..(27): 2'-O-Methyl
  misc_feature (29)..(34): 2'-O-Methyl
  misc_feature (9)..(9): 2'-deoxy-2'-amino
  misc_feature (12)..(12): 2'-deoxy-2'-amino

SEQ ID NO: 20814 - RNA, 36 nt, Artificial Sequence
  Description of Artificial Sequence:  Enzymatic Nucleic Acid
  misc_feature (2)..(5): Phosphorothioate 3'-Internucleotide Linkage
  misc_feature (1)..(8): 2'-O-Methyl
  misc_feature (14)..(26): 2'-O-Methyl
  misc_feature (28)..(29): 2'-O-Methyl
  misc_feature (31)..(36): 2'-O-Methyl
  misc_feature (9)..(9): 2'-deoxy-2'-amino
  misc_feature (12)..(12): 2'-deoxy-2'-amino
aucuuuucugaugaggccgaaaggccgaaaccauac

SEQ ID NO: 20815 - RNA, 13 nt, Artificial Sequence
  Description of Artificial Sequence:  flt-1 substrate
cagacuacaacuc

SEQ ID NO: 20816 - RNA, 32 nt, Artificial Sequence
  Description of Artificial Sequence:  Enzymatic Nucleic Acid
  misc_feature (1)..(4): Phosphorothioate 3'-Internucleotide Linkage
  misc_feature (1)..(7): 2'-O-Methyl
  misc_feature (13)..(23): 2'-O-Methyl
  misc_feature (25)..(26): 2'-O-Methyl
  misc_feature (28)..(32): 2'-O-Methyl
  misc_feature (8)..(8): 2'-deoxy-2'-amino
  misc_feature (11)..(11): 2'-deoxy-2'-amino
gaguggcugaugaggcgaaagccgaaagucug

SEQ ID NO: 20817 - RNA, 34 nt, Artificial Sequence; identical to SEQ ID NO: 13494
  Description of Artificial Sequence:  Enzymatic Nucleic Acid
  misc_feature (1)..(4): Phosphorothioate 3'-Internucleotide Linkage
  misc_feature (1)..(7): 2'-O-Methyl
  misc_feature (13)..(25): 2'-O-Methyl
  misc_feature (27)..(28): 2'-O-Methyl
  misc_feature (30)..(34): 2'-O-Methyl
  misc_feature (8)..(8): 2'-deoxy-2'-amino
  misc_feature (11)..(11): 2'-deoxy-2'-amino

SEQ ID NO: 20818 - RNA, 34 nt, Artificial Sequence; identical to SEQ ID NO: 13494
  Description of Artificial Sequence:  Enzymatic Nucleic Acid
  misc_feature (1)..(4): Phosphorothioate 3'-Internucleotide Linkage
  misc_feature (1)..(8): 2'-O-Methyl
  misc_feature (11)..(11): 2'-O-Methyl
  misc_feature (13)..(25): 2'-O-Methyl
  misc_feature (27)..(28): 2'-O-Methyl
  misc_feature (30)..(34): 2'-O-Methyl
  misc_feature (8)..(8): 2'-deoxy-2'-C-Allyl
  misc_feature (34)..(34): 3'-attached inverted deoxyabasic moiety

SEQ ID NO: 20819 - RNA, 15 nt, Homo sapiens
gcgcggcgcaggcac

SEQ ID NO: 20820 - RNA, 35 nt, Artificial Sequence
  Description of Artificial Sequence:  Enzymatic Nucleic Acid
  misc_feature (1)..(7): 2'-O-Methyl
  misc_feature (9)..(15): 2'-O-Methyl
  misc_feature (19)..(19): 2'-O-Methyl
  misc_feature (21)..(21): 2'-O-Methyl
  misc_feature (23)..(23): 2'-O-Methyl
  misc_feature (26)..(26): 2'-O-Methyl
  misc_feature (28)..(35): 2'-O-Methyl
  misc_feature (1)..(4): Phosphorothioate 3'-Internucleotide Linkage
  misc_feature (17)..(17): 2'-Deoxy-2'-Amino
  misc_feature (27)..(27): 2'-Deoxy-2'-Amino
  misc_feature (35)..(35): 3'-attached inverted deoxyabasic moiety
gugccuggccgaaaggcgagugaggucugccgcgc

SEQ ID NO: 20821 - DNA, 16 bp, Artificial Sequence
  Description of Artificial Sequence:  DNAzyme motif
rggctagctacaacga

SEQ ID NO: 20822 - RNA, 10 nt, Artificial Sequence
  Description of Artificial Sequence:  Enzymatic Nucleic Acid Stem Loop
gccguuaggc

SEQ ID NO: 20823 - RNA, 5777 nt, Homo sapiens
gcggacacuccucucggcuccuccccggcagcggcggcggcucggagcgggcuccggggcucgggugcagcggccagcgggccuggcggcgaggauuacccggggaagugguugucuccuggcuggagccgcgagacgggcgcucagggcgcggggccggcggcggcgaacgagaggacggacucuggcggccgggucguuggccgggggagcgcgggcaccgggcgagcaggccgcgucgcgcucaccauggucagcuacugggacaccgggguccugcugugcgcgcugcucagcugucugcuucucacaggaucuaguucagguucaaaauuaaaagauccugaacugaguuuaaaaggcacccagcacaucaugcaagcaggccagacacugcaucuccaaugcaggggggaagcagcccauaaauggucuuugccugaaauggugaguaaggaaagcgaaaggcugagcauaacuaaaucugccuguggaagaaauggcaaacaauucugcaguacuuuaaccuugaacacagcucaagcaaaccacacuggcuucuacagcugcaaauaucuagcuguaccuacuucaaagaagaaggaaacagaaucugcaaucuauauauuuauuagugauacagguagaccuuucguagagauguacagugaaauccccgaaauuauacacaugacugaaggaagggagcucgucauucccugccggguuacgucaccuaacaucacuguuacuuuaaaaaaguuuccacuugacacuuugaucccugauggaaaacgcauaaucugggacaguagaaagggcuucaucauaucaaaugcaacguacaaagaaauagggcuucugaccugugaagcaacagucaaugggcauuuguauaagacaaacuaucucacacaucgacaaaccaauacaaucauagauguccaaauaagcacaccacgcccagucaaauuacuuagaggccauacucuuguccucaauuguacugcuaccacucccuugaacacgagaguucaaaugaccuggaguuacccugaugaaaaaaauaagagagcuuccguaaggcgacgaauugaccaaagcaauucccaugccaacauauucuacaguguucuuacuauugacaaaaugcagaacaaagacaaaggacuuuauacuugucguguaaggaguggaccaucauucaaaucuguuaacaccucagugcauauauaugauaaagcauucaucacugugaaacaucgaaaacagcaggugcuugaaaccguagcuggcaagcggucuuaccggcucucuaugaaagugaaggcauuucccucgccggaaguuguaugguuaaaagauggguuaccugcgacugagaaaucugcucgcuauuugacucguggcuacucguuaauuaucaaggacguaacugaagaggaugcagggaauuauacaaucuugcugagcauaaaacagucaaauguguuuaaaaaccucacugccacucuaauugucaaugugaaaccccagauuuacgaaaaggccgugucaucguuuccagacccggcucucuacccacugggcagcagacaaauccugacuuguaccgcauaugguaucccucaaccuacaaucaagugguucuggcaccccuguaaccauaaucauuccgaagcaaggugugacuuuuguuccaauaaugaagaguccuuuauccuggaugcugacagcaacaugggaaacagaauugagagcaucacucagcgcauggcaauaauagaaggaaagaauaagauggcuagcaccuugguuguggcugacucuagaauuucuggaaucuacauuugcauagcuuccaauaaaguugggacugugggaagaaacauaagcuuuuauaucacagaugugccaaauggguuucauguuaacuuggaaaaaaugccgacggaaggagaggaccugaaacugucuugcacaguuaacaaguucuuauacagagacguuacuuggauuuuacugcggacaguuaauaacagaacaaugcacuacaguauuagcaagcaaaaaauggccaucacuaaggagcacuccaucacucuuaaucuuaccaucaugaauguuucccugcaagauucaggcaccuaugccugcagagccaggaauguauacacaggggaagaaauccuccagaagaaagaaauuacaaucagagaucaggaagcaccauaccuccugcgaaaccucagugaucacacaguggccaucagcaguuccaccacuuuagacugucaugcuaaugguguccccgagccucagaucacuugguuuaaaaacaaccacaaaauacaacaagagccuggaauuauuuuaggaccaggaagcagcacgcuguuuauugaaagagucacagaagaggaugaaggugucuaucacugcaaagccaccaaccagaagggcucuguggaaaguucagcauaccucacuguucaaggaaccucggacaagucuaaucuggagcugaucacucuaacaugcaccuguguggcugcgacucucuucuggcuccuauuaacccuccuuauccgaaaaaugaaaaggucuucuucugaaauaaagacugacuaccuaucaauuauaauggacccagaugaaguuccuuuggaugagcagugugagcggcucccuuaugaugccagcaagugggaguuugcccgggagagacuuaaacugggcaaaucacuuggaagaggggcuuuuggaaaagugguucaagcaucagcauuuggcauuaagaaaucaccuacgugccggacuguggcugugaaaaugcugaaagagggggccacggccagcgaguacaaagcucugaugacugagcuaaaaaucuugacccacauuggccaccaucugaacgugguuaaccugcugggagccugcaccaagcaaggagggccucugauggugauuguugaauacugcaaauauggaaaucucuccaacuaccucaagagcaaacgugacuuauuuuuucucaacaaggaugcagcacuacacauggagccuaagaaagaaaaaauggagccaggccuggaacaaggcaagaaaccaagacuagauagcgucaccagcagcgaaagcuuugcgagcuccggcuuucaggaagauaaaagucugagugauguugaggaagaggaggauucugacgguuucuacaaggagcccaucacuauggaagaucugauuucuuacaguuuucaaguggccagaggcauggaguuccugucuuccagaaagugcauucaucgggaccuggcagcgagaaacauucuuuuaucugagaacaacguggugaagauuugugauuuuggccuugcccgggauauuuauaagaaccccgauuaugugagaaaaggagauacucgacuuccucugaaauggauggcucccgaaucuaucuuugacaaaaucuacagcaccaagagcgacguguggucuuacggaguauugcugugggaaaucuucuccuuaggugggucuccauacccaggaguacaaauggaugaggacuuuugcagucgccugagggaaggcaugaggaugagagcuccugaguacucuacuccugaaaucuaucagaucaugcuggacugcuggcacagagacccaaaagaaaggccaagauuugcagaacuuguggaaaaacuaggugauuugcuucaagcaaauguacaacaggaugguaaagacuacaucccaaucaaugccauacugacaggaaauaguggguuuacauacucaacuccugccuucucugaggacuucuucaaggaaaguauuucagcuccgaaguuuaauucaggaagcucugaugaugucagauauguaaaugcuuucaaguucaugagccuggaaagaaucaaaaccuuugaagaacuuuuaccgaaugccaccuccauguuugaugacuaccagggcgacagcagcacucuguuggccucucccaugcugaagcgcuucaccuggacugacagcaaacccaaggccucgcucaagauugacuugagaguaaccaguaaaaguaaggagucggggcugucugaugucagcaggcccaguuucugccauuccagcugugggcacgucagcgaaggcaagcgcagguucaccuacgaccacgcugagcuggaaaggaaaaucgcgugcugcuccccgcccccagacuacaacucggugguccuguacuccaccccacccaucuagaguuugacacgaagccuuauuucuagaagcacauguguauuuauacccccaggaaacuagcuuuugccaguauuaugcauauauaaguuuacaccuuuaucuuuccaugggagccagcugcuuuuugugauuuuuuuaauagugcuuuuuuuuuuugacuaacaagaauguaacuccagauagagaaauagugacaagugaagaacacuacugcuaaauccucauguuacucaguguuagagaaauccuuccuaaacccaaugacuucccugcuccaacccccgccaccucagggcacgcaggaccaguuugauugaggagcugcacugaucacccaaugcaucacguaccccacugggccagcccugcagcccaaaacccagggcaacaagcccguuagccccaggggaucacuggcuggccugagcaacaucucgggaguccucuagcaggccuaagacaugugaggaggaaaaggaaaaaaagcaaaaagcaagggagaaaagagaaaccgggagaaggcaugagaaagaauuugagacgcaccaugugggcacggagggggacggggcucagcaaugccauuucaguggcuucccagcucugacccuucuacauuugagggcccagccaggagcagauggacagcgaugaggggacauuuucuggauucugggaggcaagaaaaggacaaauaucuuuuuuggaacuaaagcaaauuuuagaccuuuaccuauggaagugguucuauguccauucucauucguggcauguuuugauuuguagcacugaggguggcacucaacucugagcccauacuuuuggcuccucuaguaagaugcacugaaaacuuagccagaguuagguugucuccaggccaugauggccuuacacugaaaaugucacauucuauuuuggguauuaauauauaguccagacacuuaacucaauuucuugguauuauucuguuuugcacaguuaguugugaaagaaagcugagaagaaugaaaaugcaguccugaggagaguuuucuccauaucaaaacgagggcugauggaggaaaaaggucaauaaggucaagggaagaccccgucucuauaccaaccaaaccaauucaccaacacaguugggacccaaaacacaggaagucagucacguuuccuuuucauuuaauggggauuccacuaucucacacuaaucugaaaggauguggaagagcauuagcuggcgcauauuaagcacuuuaagcuccuugaguaaaaaggugguauguaauuuaugcaagguauuucuccaguugggacucaggauauuaguuaaugagccaucacuagaagaaaagcccauuuucaacugcuuugaaacuugccuggggucugagcaugaugggaauagggagacaggguaggaaagggcgccuacucuucagggucuaaagaucaagugggccuuggaucgcuaagcuggcucuguuugaugcuauuuaugcaaguuagggucuauguauuua

SEQ ID NO: 20824 - RNA, 5830 nt, Homo sapiens
acugagucccgggaccccgggagagcggucaguguguggucgcugcguuuccucugccugcgccgggcaucacuugcgcgccgcagaaaguccgucuggcagccuggauauccucuccuaccggcacccgcagacgccccugcagccgccggucggcgcccgggcucccuagcccugugcgcucaacuguccugcgcugcggggugccgcgaguuccaccuccgcgccuccuucucuagacaggcgcugggagaaagaaccggcucccgaguucugggcauuucgcccggcucgaggugcaggaugcagagcaaggugcugcuggccgucgcccuguggcucugcguggagacccgggccgccucuguggguuugccuaguguuucucuugaucugcccaggcucagcauacaaaaagacauacuuacaauuaaggcuaauacaacucuucaaauuacuugcaggggacagagggacuuggacuggcuuuggcccaauaaucagaguggcagugagcaaaggguggaggugacugagugcagcgauggccucuucuguaagacacucacaauuccaaaagugaucggaaaugacacuggagccuacaagugcuucuaccgggaaacugacuuggccucggucauuuaugucuauguucaagauuacagaucuccauuuauugcuucuguuagugaccaacauggagucguguacauuacugagaacaaaaacaaaacuguggugauuccaugucucggguccauuucaaaucucaacgugucacuuugugcaagauacccagaaaagagauuuguuccugaugguaacagaauuuccugggacagcaagaagggcuuuacuauucccagcuacaugaucagcuaugcuggcauggucuucugugaagcaaaaauuaaugaugaaaguuaccagucuauuauguacauaguugucguuguaggguauaggauuuaugaugugguucugaguccgucucauggaauugaacuaucuguuggagaaaagcuugucuuaaauuguacagcaagaacugaacuaaauguggggauugacuucaacugggaauacccuucuucgaagcaucagcauaagaaacuuguaaaccgagaccuaaaaacccagucugggagugagaugaagaaauuuuugagcaccuuaacuauagaugguguaacccggagugaccaaggauuguacaccugugcagcauccagugggcugaugaccaagaagaacagcacauuugucaggguccaugaaaaaccuuuuguugcuuuuggaaguggcauggaaucucugguggaagccacggugggggagcgugucagaaucccugcgaaguaccuugguuacccacccccagaaauaaaaugguauaaaaauggaauaccccuugaguccaaucacacaauuaaagcggggcauguacugacgauuauggaagugagugaaagagacacaggaaauuacacugucauccuuaccaaucccauuucaaaggagaagcagagccauguggucucucugguuguguaugucccaccccagauuggugagaaaucucuaaucucuccuguggauuccuaccaguacggcaccacucaaacgcugacauguacggucuaugccauuccucccccgcaucacauccacugguauuggcaguuggaggaagagugcgccaacgagcccagccaagcugucucagugacaaacccauacccuugugaagaauggagaaguguggaggacuuccagggaggaaauaaaauugaaguuaauaaaaaucaauuugcucuaauugaaggaaaaaacaaaacuguaaguacccuuguuauccaagcggcaaaugugucagcuuuguacaaaugugaagcggucaacaaagucgggagaggagagagggugaucuccuuccacgugaccagggguccugaaauuacuuugcaaccugacaugcagcccacugagcaggagagcgugucuuuguggugcacugcagacagaucuacguuugagaaccucacaugguacaagcuuggcccacagccucugccaauccaugugggagaguugcccacaccuguuugcaagaacuuggauacucuuuggaaauugaaugccaccauguucucuaauagcacaaaugacauuuugaucauggagcuuaagaaugcauccuugcaggaccaaggagacuaugucugccuugcucaagacaggaagaccaagaaaagacauugcguggucaggcagcucacaguccuagagcguguggcacccacgaucacaggaaaccuggagaaucagacgacaaguauuggggaaagcaucgaagucucaugcacggcaucugggaaucccccuccacagaucaugugguuuaaagauaaugagacccuuguagaagacucaggcauuguauugaaggaugggaaccggaaccucacuauccgcagagugaggaaggaggacgaaggccucuacaccugccaggcaugcaguguucuuggcugugcaaaaguggaggcauuuuucauaauagaaggugcccaggaaaagacgaacuuggaaaucauuauucuaguaggcacggcggugauugccauguucuucuggcuacuucuugucaucauccuacggaccguuaagcgggccaauggaggggaacugaagacaggcuacuuguccaucgucauggauccagaugaacucccauuggaugaacauugugaacgacugccuuaugaugccagcaaaugggaauuccccagagaccggcugaagcuagguaagccucuuggccguggugccuuuggccaagugauugaagcagaugccuuuggaauugacaagacagcaacuugcaggacaguagcagucaaaauguugaaagaaggagcaacacacagugagcaucgagcucucaugucugaacucaagauccucauucauauuggucaccaucucaauguggucaaccuucuaggugccuguaccaagccaggagggccacucauggugauuguggaauucugcaaauuuggaaaccuguccacuuaccugaggagcaagagaaaugaauuuguccccuacaagaccaaaggggcacgauuccgucaagggaaagacuacguuggagcaaucccuguggaucugaaacggcgcuuggacagcaucaccaguagccagagcucagccagcucuggauuuguggaggagaagucccucagugauguagaagaagaggaagcuccugaagaucuguauaaggacuuccugaccuuggagcaucucaucuguuacagcuuccaaguggcuaagggcauggaguucuuggcaucgcgaaaguguauccacagggaccuggcggcacgaaauauccucuuaucggagaagaacgugguuaaaaucugugacuuuggcuuggcccgggauauuuauaaagauccagauuaugucagaaaaggagaugcucgccucccuuugaaauggauggccccagaaacaauuuuugacagaguguacacaauccagagugacgucuggucuuuugguguuuugcugugggaaauauuuuccuuaggugcuucuccauauccugggguaaagauugaugaagaauuuuguaggcgauugaaagaaggaacuagaaugagggccccugauuauacuacaccagaaauguaccagaccaugcuggacugcuggcacggggagcccagucagagacccacguuuucagaguugguggaacauuugggaaaucucuugcaagcuaaugcucagcaggauggcaaagacuacauuguucuuccgauaucagagacuuugagcauggaagaggauucuggacucucucugccuaccucaccuguuuccuguauggaggaggaggaaguaugugaccccaaauuccauuaugacaacacagcaggaaucagucaguaucugcagaacaguaagcgaaagagccggccugugaguguaaaaacauuugaagauaucccguuagaagaaccagaaguaaaaguaaucccagaugacaaccagacggacagugguaugguucuugccucagaagagcugaaaacuuuggaagacagaaccaaauuaucuccaucuuuugguggaauggugcccagcaaaagcagggagucuguggcaucugaaggcucaaaccagacaagcggcuaccaguccggauaucacuccgaugacacagacaccaccguguacuccagugaggaagcagaacuuuuaaagcugauagagauuggagugcaaaccgguagcacagcccagauucuccagccugacucggggaccacacugagcucuccuccuguuuaaaaggaagcauccacaccccaacucccggacaucacaugagaggucugcucagauuuugaaguguuguucuuuccaccagcaggaaguagccgcauuugauuuucauuucgacaacagaaaaaggaccucggacugcagggagccagucuucuaggcauauccuggaagaggcuugugacccaagaaugugucugugucuucucccaguguugaccugauccucuuuuuucauucauuuaaaaagcauuaucaugccccugcugcgggucucaccauggguuuagaacaaagagcuucaagcaauggccccauccucaaagaaguagcaguaccuggggagcugacacuucuguaaaacuagaagauaaaccaggcaacguaaguguucgagguguugaagaugggaaggauuugcagggcugagucuauccaagaggcuuuguuuaggacgugggucccaagccaagccuuaaguguggaauucggauugauagaaaggaagacuaacguuaccuugcuuuggagaguacuggagccugcaaaugcauuguguuugcucugguggaggugggcauggggucuguucugaaauguaaaggguucagacgggguuucugguuuuagaagguugcguguucuucgaguugggcuaaaguagaguucguugugcuguuucugacuccuaaugagaguuccuuccagaccguuagcugucuccuugccaagccccaggaagaaaaugaugcagcucuggcuccuugucucccaggcugauccuuuauucagaauaccacaaagaaaggacauucagcucaaggcucccugccguguugaagaguucugacugcacaaaccagcuucugguuucuucuggaaugaauacccucauaucuguccugaugugauaugucugagacugaaugcgggagguucaaugugaagcuguguguggugucaaaguuucaggaaggauuuuacccuuuuguucuucccccuguccccaacccacucucaccccgcaacccaucaguauuuuaguuauuuggccucuacuccaguaaaccugauuggguuuguucacucucugaaugauuauuagccagacuucaaaauuauuuuauagcccaaauuauaacaucuauuguauuauuuagacuuuuaacauauagagcuauuucuacugauuuuugcccuuguucuguccuuuuuuucaaaaaagaaaauguguuuuuuguuugguaccauagugugaaaugcugggaacaaugacuauaagacaugcuauggcacauauauuuauagucuguuuauguagaaacaaauguaauauauuaaagccuuauauauaaugaacuuuguacuauucacauuuuguaucaguauuauguagcauaacaaaggucauaaugcuuucagcaauugaugucauuuuauuaaagaacauugaaaaacuuga

1. A method for down regulating expression of vascular endothelial growth factor receptors (VEGFRs) in an endothelial cell in vitro comprising contacting the cell with an enzymatic nucleic acid molecule that down regulates expression of VEGFR1 and an enzymatic nucleic acid molecule that down regulates expression of VEGFR2 under conditions suitable for down regulating expression of VEGFRs in the endothelial cell in vitro, wherein each of the enzymatic nucleic acid molecules contact the cell in the presence of a delivery reagent and wherein each of the enzymatic nucleic acid molecules have sufficient complementarity to VEGFR1 or VEGFR2 RNA for each of the enzymatic nucleic acid molecules to direct cleavage of the VEGFR1 or VEGFR2 RNA, wherein said VEGFR1 RNA comprises SEQ ID NO: 20823 and said VEGFR2 RNA comprises SEQ ID NO: 20824.

2. The method of claim 1, wherein said endothelial cell is a mammalian cell.

3. The method of claim 1, wherein said endothelial cell is a human cell.

4. The method of claim 1, wherein said delivery reagent is a lipid.

5. The method of claim 4, wherein said lipid is a cationic lipid.

6. The method of claim 1, wherein said delivery reagent is a liposome.
